(19) United States
(12) Patent Application Publication
(10) Pub. No.: US 2022/0033846 A1
(43) Pub. Date: Feb. 3, 2022

(54) APP MODIFICATION VIA BASE EDITING USING THE CRISPR/CAS9 SYSTEM

(71) Applicants: Jacques P. TREMBLAY, Québec (CA); Joël ROUSSEAU, Québec (CA); Antoine GUYON, Québec (CA)

(72) Inventors: Jacques P. TREMBLAY, Québec (CA); Joël ROUSSEAU, Québec (CA); Antoine GUYON, Québec (CA)

(21) Appl. No.: 17/309,808

(22) PCT Filed: Dec. 20, 2019
(86) PCT No.: PCT/CA2019/051876

§ 371 Date: Jun. 18, 2021

Related U.S. Application Data
(60) Provisional application No. 62/783,573, filed on Dec. 21, 2018.

(51) Int. Cl. C12N 15/85; C12N 9/22; C12N 15/113

(52) U.S. Cl. CPC C12N 15/85; A61K 38/46; C12N 15/113; C12N 9/22

(57) ABSTRACT

Methods and products (e.g., guide RNAs or pegRNA and recombinant proteins) are described for decreasing amyloidogenic Aβ peptide levels produced by a cell, or the aggregation of the Aβ peptide, as well as uses of such methods and products, for example for the treatment of Alzheimer's disease and/or age-related cognitive decline in a subject in need thereof.

### CROSS REFERENCE TO RELATED APPLICATIONS

[0001] This application claims priority of U.S. provisional application Ser. No. 62/783,573 filed on Dec. 21, 2018, which is incorporated herein by reference in its entirety.

### SEQUENCE LISTING

[0002] This application contains a Sequence Listing in computer readable form entitled “17002_6_SeqList.txt”, created Dec. 20, 2019 and having a size of about 1,074 KB. The computer readable form is incorporated herein by reference.

### FIELD OF THE DISCLOSURE

[0003] The present disclosure relates to the introduction of modifications in the Amyloid 3 Precursor Protein (APP) gene via base or prime editing using the CRISPR/CAS9 system, as well as to uses thereof, for example to decrease the production of amyloidogenic Aβ peptides, and to prevent or treat Alzheimer's disease and/or age-related cognitive decline.

### BACKGROUND OF THE DISCLOSURE

[0004] More than 5% of the population of the Western world above the age of 60 is affected by dementia. Two thirds of these cases are due to Alzheimer's disease (AD)¹⁻³. The prevalence of AD doubles every 5 years after age 65. Thus, in persons older than 90 years of age there is a prevalence of more than 25%³. The diagnosis of AD is confirmed by 2 major histopathologic hallmarks: senile plaques, which are extracellular deposits of amyloid β (Aβ) peptides, and neurofibrillary tangles, which are somatic inclusions of the microtubule-associated protein tau.

The amyloid cascade hypothesis: structure and metabolic processing of the Amyloid β Precursor Protein (APP)

[0005] The role of Amyloid β (Aβ) peptide aggregation and deposition in AD pathogenesis is widely accepted. These toxic peptides are produced by the metabolic processing of the APP protein. APP is an integral membrane protein expressed in many tissues and concentrated in the synapses of neurons. APP proteolysis generates Aβ peptides containing 37 to 49 amino acids. The amyloid fibril (also called amyloid bodies) form of these peptides is the primary component of amyloid plaques found in the brains of AD patients.

[0006] Genetic alterations in APP suffice to cause early-onset Familial Alzheimer's Disease (FAD). Abnormalities induced by aggregated Aβ peptides have been linked to synaptic and neuritic degeneration. This is consistent with the “dying-back” pattern of degeneration that characterizes neurons affected in AD.

[0007] Amyloid plaque formation is a central pathological feature of AD. These plaques largely consist of Aβ peptides⁴. The Aβ peptides are formed through sequential proteolytic processing of the APP protein by β-secretase and γ-secretase⁵ (FIG. 1). The γ-secretase complex includes presenilin-1 and presenilin-2. β-secretase, also called the beta-site amyloid precursor protein cleaving enzyme 1 (BACE1), was originally identified about two decades ago^{6,7}. It cleaves APP mostly at a unique site (located between amino acids 671 and 672). However, the γ-secretase complex cleaves the resulting carboxy-terminal fragment at several places, especially at positions 40 and 42. The cleavage by this enzyme leads to the formation of amyloid Aβ1-40 and Aβ1-42 peptides⁵. Alternative processing of APP by the α-secretase prevents the formation of Aβ peptides because the α-site is located within Aβ peptides. The neurotoxic potential of the Aβ peptides results from their biochemical properties that favor aggregation into insoluble oligomers and protofibrils. These oligomers and protofibrils accumulate into senile and neuritic plaques. These plaques, along with a reduction of Aβ clearance from the brain, lead to the extracellular accumulation of Aβ into amyloid bodies. This leads to activation of neurotoxic cascades and ultimately to cytoskeletal changes, neuronal dysfunction and cellular death.

[0008] The amyloid cascade hypothesis is based mostly on findings from in vitro and in vivo studies, and is further strengthened by the discovery of genetic mutations associated with early-onset, familial AD. Familial ADs (FADs) are severe forms of the disease, in which massive intra-cerebral amyloidogenesis occurs prematurely as a consequence of mutations all affecting APP metabolism (i.e., mutations in the APP gene in chromosome 21, and in presenilin 1 and 2 (PSEN-1 and PSEN-2) genes in chromosomes 14 and 1 respectively). Currently, two proteins are deemed intimately involved in the clearance of Aβ peptides from the brain: apolipoprotein E (APOE) and the insulin-degrading enzyme (IDE). Disadvantageous genetic polymorphisms (such as the E4 allele of APOE) and pathological conditions related to abnormal IDE homeostasis (e.g., diabetes mellitus) also favor the amyloidogenic cleavage of APP and/or decrease the Aβ clearance from the brain. This facilitates the accumulation of Aβ in the neural tissues and promote downstream effects of the amyloid cascade⁸.

[0009] There is thus a need for methods and products to reduce the production of toxic Aβ peptides, and for the prevention and treatment of related conditions such as AD and age-related cognitive decline.

[0010] The present description refers to a number of documents and sequence database entries, the content of which is herein incorporated by reference in their entirety.

### SUMMARY OF THE DISCLOSURE

[0011] The present disclosure relates to the introduction of modifications in the Amyloid β Precursor Protein (APP) gene via base or prime editing using the CRISPR/CAS9 system, as well as to uses thereof, for example to decrease the production of amyloidogenic Aβ peptides, and to prevent or treat Alzheimer's disease and/or age-related cognitive decline.

[0012] More specifically, in accordance with aspects and embodiments of the present disclosure, there are provided the following items:

1. A method of decreasing Amyloid Precursor Protein (APP) processing into amyloidogenic Aβ peptide by a cell or the aggregation of the Aβ peptide, comprising providing said cell with:
[0013] a. a1) at least one guide RNA comprising a seed region of at least 18 consecutive nucleotides of a target sequence in an endogenous APP-encoding polynucleotide sequence present in said cell, wherein the target sequence of the guide RNA guide sequence is contiguous to a protospacer adjacent motif (PAM) in the endogenous APP gene polynucleotide sequence and wherein said PAM is recognized by a ribonucleoprotein complex comprising a Cas9 nickase; or
   [0014] a2) a vector comprising a nucleic acid sequence corresponding to the guide RNA for expressing the guide RNA; and
[0015] b. b1) a Cas nickase-deaminase fusion protein comprising (i) a Cas nickase polypeptide domain and (ii) a cytidine deaminase polypeptide domain or an adenosine deaminase polypeptide domain; or
   [0016] b2) a vector comprising a nucleic acid sequence encoding the Cas nickase-deaminase fusion protein, for expression of the Cas nickase-deaminase fusion protein; and
[0017] wherein at least one modification is introduced into the target sequence of the APP-encoding polynucleotide, wherein the at least one modification comprises modification of a cytidine into a thymidine or an adenosine into an inosine, and wherein the at least one modification decreases the processing of APP into amyloidogenic Aβ peptide by the cell or the aggregation of the Aβ peptide;
[0018] and wherein if the APP-encoding nucleotide is mRNA and the at least one modification comprises deamination of an adenosine into an inosine, the gRNA further comprises a cytidine mismatch with the adenosine to be deaminated to an inosine in the target sequence.
   2. The method of item 1, wherein said Cas nickase polypeptide domain comprises a SpCas9 nickase, a SaCas9 nickase, a CjCas9 nickase, ScCas9 nickase, CasX nickase, CasY nickase, Cpf1 nickase, eSaCas9 nickase eSpCas9 nickase or a HiFi Cas9 nickase.
   3. The method of item 1, wherein said Cas nickase-deaminase fusion protein is SpCas9n VQR BE3, SpCas9n EQR BE3, SaCas9n-KKH BE3, YE1-SpCas9n VQR BE3, YE1-SpCas9n EQR BE3, YE1-SaCas9n-KKH BE3, SpCas9n VQR BE4, SpCas9n EQR BE4, SaCas9n-KKH BE4, Target-AID SpCas9n VQR, Target-AID SpCas9n EQR, Target-AID SaCas9n-KKH or Target-AID-BE3.
   4. The method of any one of items 1 to 3, wherein the nucleic acid sequence corresponding to the guide RNA and the nucleic acid sequence encoding the Cas nickase-deaminase fusion protein are comprised in the same vector.
   5. The method of any one of items 1 to 4, wherein the at least one modification is located in intron 15, exon 16, intron 16, exon 17 and/or intron 17 of the APP-encoding polynucleotide sequence.
   6. The method of any one of items 1 to 5, wherein said at least one modification results in at least one amino acid substitution in the region defined by amino acid positions 656 to 688 in the APP protein, wherein said amino acid positions are with respect to the APP protein sequence as set forth in SEQ ID NO: 2 (NG_007376.1; FIG. 3).
   7. The method of item 6, wherein said at least one amino acid substitution corresponds to at least one substitution at amino acid position 670, 671, 673, 678, 682, 684, 692, 693, 694, 704, 711, 712, 713, 714, 715 and/or 684 of the APP protein.
   8. The method of item 7, wherein the at least one amino acid substitution introduces a threonine at position 673.
   9. The method of item 7, wherein the at least one amino acid substitution introduces of a valine at position 673.
   10. The method of item 7, wherein the at least one amino acid substitution introduces of an arginine at position 684.
   11. The method of any one of items 5-10, wherein said at least one modification in APP gene or mRNA results in a modification of one or more amino acids recognized by an α, β, or γ secretase in the APP protein encoded by said APP polynucleotide gene or mRNA sequence present in said cell.
   12. The method of any one of items 5-10, wherein said at least one modification corrects a mutation associated with an increased risk of developing Alzheimer's disease present in said endogenous APP polynucleotide gene sequence present in said cell.
   13. The method of any one of items 5-10, wherein said at least one modification results in a mutation which reduces risk of developing Alzheimer's disease by reducing the formation or the aggregation of Amyloidogenic peptides.
   14. The method of any one of items 1-13, wherein said cell is from a subject having at least one family member which has been diagnosed with Alzheimer's disease.
   15. The method of any one of items 1-13, wherein said cell is from a subject having at least one mutation associated with early onset Alzheimer's disease.
   16. The method of any one of items 1-13, wherein said cell is from a subject having a chance of developing a sporadic form Alzheimer's disease.
   17. The method of any one of items 1 to 16, wherein the guide RNA (guide RNA) sequence comprises at least 20 contiguous nucleotides of the target sequence in the endogenous APP polynucleotide gene or mRNA.
   18. The method of any one of items 1 to 17, wherein the PAM is MA, AAG, ACA, ATG, CC, CAA, CCN, GM, GAT, GGA, GGC, GGT, GTA, GTC, GTT, TCN, NG, NGG, NNG, NAG, NGA, NNAGAA, NNGAAT, NNGAGT, NNGGAT, NNGGGT, NNNAAT NNNAGT, NNNGAT, NNNGCA, NNNGGT, NNNNACA, NNNNACAC, NNNNATAC, NNNNGAAT, NNNNGATT, NNNNGCAC, NNNNGTAC, NNNNGTAT, NNNNGTTT, TGA, TGC, TGT, TTA, TTC, TTT, TTTA or a TTTC sequence.
   19. The method of any one of items 1 to 18, wherein the APP-encoding polynucleotide is an APP gene polynucleotide or an APP mRNA.
   20. The method of any one of items 1 to 19, wherein the target sequence of said guide RNA is located in an exon or an intron of the APP-encoding polynucleotide.
   21. The method of any one of items 1-20, wherein the target sequence is located between nucleotides 270798 and 294050 of the APP gene (SEQ ID NO: 1; ACCESSION NG_007376.1).
   22. The method of any one of items 1-21, wherein said at least one guide RNA comprises the following nucleic acid sequence:

SpCas9 VQR guide RNAs for A673T mutation:
(SEQ ID NO: 138)
AUUCUGCAUCCAUCUUCACUUC
SaCas9 guide RNAs for A673T mutation:
(SEQ ID NO: 139)
AUUCUGCAUCCAUCUUCACUUC
Target AID_SpCas9n guide RNA for A673V mutation:
(SEQ ID NO: 140)
GCAGAAUUCCGACAUGACUC
SpCas9 guide RNA for H684R mutation:
(SEQ ID NO: 141)
UGAAGUUCAUCAUCAAAAAU
SaCas9 KKH guide RNA for H684R mutation:
(SEQ ID NO: 142)
CAUCAUCAAAAAUUGGUACG
SpCas9 for ABE6.3, ABE7.8, ABE7.9 and
ABE7.10 for the H684R mutation in the DNA
(SEQ ID NO: 143)
UGAAGUUCAUCAUCAAAAAUGUUUAAGAGCUAUGCUGG
AAACAGCAUAGCAAGUUUAAAUAAGGCUAGUCCGUUAU
CAACUUGAAAAAGUGGCACCGAGUCGGUGC
Adenosine deaminase fused with SaCas9KKH
for the H684R mutation in the DNA
(SEQ ID NO: 144)
CAUCAUCAAAAAUUGGUACGGUUUUAGUACUCUGGAAACAG
AAUCUACUAAAACAAGGCAAAAUGCCGUGUUUAUCUCGUCA
ACUUGUUGGCGAGA
SpCas13b-ADAR2_{DD} (REPAIRv2) for the
H684R mutation in the mRNA
(SEQ ID NO: 145)
GAUGACGAACUUCAUAUCCUGAGUCAUGUCGGAAUUCUGCA
UCCAUCUUC
SpCas13b-ADAR2_{DD} (REPAIRv2) for the H684R
mutation in the mRNA
(SEQ ID NO: 146)
ACCAAUUUUUGAUGACGAACUUCAUAUCCUGAGUCAUGUCGGAAUUC
UGC
ADAR2 gRNA for H684R mutation:
(SEQ ID NO: 147)
5′GUGGAAUAGUAUAACAAUAUGCUAAAUGUUGUUAUAGUAUCCCAC
UUUUUGAUGACGAACUUC3′
wherein the underlined sequence is complementary
to the targeted sequence in the APP mRNA, and the
bold C is a mismatch for the nucleotide A to be
changed in a G in the APP mRNA.
REPAIRv2 gRNA for H684R mutation:
(SEQ ID NO: 148)
5′ACCAAUUUUUGAUGACGAACUUCAUAUCCUGAGUCAU
GUUGUGGAAGGUCCAGUUUUGGGGGCUAUUACAACA3′
wherein the underlined sequence is complementary
to the targeted sequence in the APP mRNA, and the
bold C is a mismatch for the nucleotide A to be
changed in a G in the APP mRNA.

23. The method of any one of items 1 to 22, wherein the Cas nickase-deaminase fusion protein further comprises a protein transduction domain (PTD).
24. The method of any one of items 1 to 22, wherein the Cas nickase-deaminase fusion protein further comprises a nuclear localization signal (NLS).
25. The method of any one of items 1 to 24, wherein the vector is a viral vector, a virus like particle (VLP), an extra-cellular vesicle or an exosome.
26. The method of item 25, wherein said viral vector is a lentiviral vector, Adeno-Associated viral vector, adenovirus viral vector or herpes virus viral vector.
27. A guide RNA as defined in any one of items 1 to 22.
28. An isolated nucleic acid comprising a nucleotide sequence corresponding to the guide RNA of item 27 for expressing the guide RNA.
29. An isolated nucleic acid encoding the Cas nickase-deaminase fusion protein defined in any one of items 1 to 24.
30. A vector comprising the isolated nucleic acid of item 28 and/or the isolated nucleic acid of item 29.
31. The vector of item 30, wherein the vector is a viral vector, a virus like particle (VLP), an extra-cellular vesicle or an exosome.
32. The vector of item 31, wherein the viral vector is a lentiviral vector, Adeno-Associated viral vector, adenovirus viral vector or herpes virus viral vector.
33. A system comprising:
[0019] i) the guide RNA of item 27,
[0020] ii) the Cas nickase-deaminase fusion protein defined in any one of items 1 to 24,
[0021] iii) the isolated nucleic acid of item 28 or 29,
[0022] iv) the vector of any one of items 30 to 32, or
[0023] v) any combination of (i) to (iv).
   34. A composition comprising a biologically acceptable carrier or a pharmaceutically acceptable carrier and:
[0024] i) the guide RNA of item 27,
[0025] ii) the Cas nickase-deaminase fusion protein defined in any one of items 1 to 24,
[0026] iii) the isolated nucleic acid of item 28 or 29,
[0027] iv) the vector of any one of items 30 to 32, or
[0028] v) any combination of (i) to (iv).
   35. The guide RNA of item 27, the Cas nickase-deaminase fusion protein defined in any one of items 1 to 24, the isolated nucleic acid of item 28 or 29, the vector of any one of items 30 to 32, the system of item 33, and/or the composition of item 34 for use in decreasing Amyloid Precursor Protein (APP) processing into amyloidogenic Aβ peptide by a cell or the aggregation of the Aβ peptide.
   36. The guide RNA of item 27, the Cas nickase-deaminase fusion protein defined in any one of items 1 to 24, the isolated nucleic acid of item 28 or 29, the vector of any one of items 30 to 32, the system of item 33, and/or the composition of item 34 for the preparation of a medicament for decreasing Amyloid Precursor Protein (APP) processing into amyloidogenic Aβ peptide by a cell or the aggregation of the Aβ peptide.
   37. The guide RNA, Cas nickase-deaminase fusion protein, isolated nucleic acid, vector, system, and/or composition for use of item 35 or 36, wherein the cell is from a subject having at least one family member which has been diagnosed with Alzheimer's disease.
   38. The guide RNA, Cas nickase-deaminase fusion protein, isolated nucleic acid, vector, system, and/or composition for use of item 35 or 36, wherein the cell is from a subject having at least one mutation associated with early onset Alzheimer's disease.
   39. The guide RNA of item 27, the Cas nickase-deaminase fusion protein defined in any one of items 1 to 24, the isolated nucleic acid of item 28 or 29, the vector of any one of items 30 to 32, the system of item 33, and/or the composition of item 34 for use in treating or preventing Alzheimer's disease or age-related cognitive decline in a subject in need thereof.
   40. The guide RNA of item 27, the Cas nickase-deaminase fusion protein defined in any one of items 1 to 24, the isolated nucleic acid of item 28 or 29, the vector of any one of items 30 to 32, the system of item 33, and/or the composition of item 34 for use in the preparation of a medicament for treating or preventing Alzheimer's disease or age-related cognitive decline in a subject in need thereof.
   41. The guide RNA, Cas nickase-deaminase fusion protein, isolated nucleic acid, vector, system, and/or composition for use of item 39 or 40, wherein the subject in need thereof is a subject having at least one family member (e.g., a mother, father, brother, sister or child), who has been diagnosed with Alzheimer's disease.
   42. Use of the guide RNA of item 27, the Cas nickase-deaminase fusion protein defined in any one of items 1 to 24, the isolated nucleic acid of item 28 or 29, the vector of any one of items 30 to 32, the system of item 33, and/or the composition of item 34 for decreasing Amyloid Precursor Protein (APP) processing into amyloidogenic Aβ peptide by a cell or the aggregation of the Aβ peptide.
   43. Use of the guide RNA of item 27, the Cas nickase-deaminase fusion protein defined in any one of items 1 to 24, the isolated nucleic acid of item 28 or 29, the vector of any one of items 30 to 32, the system of item 33, and/or the composition of item 34 for the preparation of a medicament for decreasing Amyloid Precursor Protein (APP) processing into amyloidogenic Aβ peptide by a cell or the aggregation of the Aβ peptide.
   44. The use of item 42 or 43, wherein the cell is from a subject having at least one family member which has been diagnosed with Alzheimer's disease.
   45. The use of item 42 or 43, wherein the cell is from a subject having at least one mutation associated with early onset Alzheimer's disease.
   46. Use of the guide RNA of item 27, the Cas nickase-deaminase fusion protein defined in any one of items 1 to 24, the isolated nucleic acid of item 28 or 29, the vector of any one of items 30 to 32, the system of item 33, and/or the composition of item 34, for treating or preventing Alzheimer's disease or age-related cognitive decline in a subject in need thereof.
   47. Use of the guide RNA of item 27, the Cas nickase-deaminase fusion protein defined in any one of items 1 to 24, the isolated nucleic acid of item 28 or 29, the vector of any one of items 30 to 32, the system of item 33, and/or the composition of item 34, for the preparation of a medicament for treating or preventing Alzheimer's disease or age-related cognitive decline in a subject in need thereof.
   48. The use of item 46 or 47, wherein said subject in need thereof is a subject having at least one family member (e.g., a mother, father, brother, sister or child), who has been diagnosed with Alzheimer's disease.
   49. The use of item 46 or 47, wherein said subject in need thereof is a subject having at least one mutation associated with early onset Alzheimer's disease.
   50. A method of decreasing Amyloid Precursor Protein (APP) processing into amyloidogenic Aβ peptide by a cell or the aggregation of the Aβ peptide, comprising introducing into the cell or contacting the cell with the guide RNA of item 27, the Cas nickase-deaminase fusion protein defined in any one of items 1 to 24, the isolated nucleic acid of item 28 or 29, the vector of any one of items 30 to 32, the system of item 33, and/or the composition of item 34.
   51. A method of decreasing Amyloid Precursor Protein (APP) processing into amyloidogenic Aβ peptide by a cell or the aggregation of the Aβ peptide, comprising providing said cell with:
[0029] a. a1) at least one pegRNA comprising a seed region of at least 18 consecutive nucleotides of a target sequence in an endogenous APP-encoding polynucleotide sequence present in said cell, wherein the target sequence of the pegRNA guide sequence is contiguous to a protospacer adjacent motif (PAM) in the endogenous APP gene polynucleotide sequence and wherein said PAM is recognized by a ribonucleoprotein complex comprising a Cas9 nickase; or
   [0030] a2) a vector comprising a nucleic acid sequence corresponding to the pegRNA for expressing the pegRNA; and
[0031] b. b1) a Cas nickase-reverse transcriptase fusion protein comprising (i) a Cas nickase polypeptide domain and (ii) a reverse transcriptase polypeptide domain; or
   [0032] b2) a vector comprising a nucleic acid sequence encoding the Cas nickase-reverse transcriptase fusion protein, for expression of the Cas nickase-reverse transcriptase fusion protein; and
[0033] wherein at least one modification is introduced into the target sequence of the APP-encoding polynucleotide, wherein the at least one modification decreases the processing of APP into amyloidogenic Aβ peptide by the cell or the aggregation of the Aβ peptide.
   52. The method of item 51, wherein said Cas nickase polypeptide domain comprises a SpCas9 nickase, a SaCas9 nickase, a CjCas9 nickase, ScCas9 nickase, CasX nickase, CasY nickase, Cpf1 nickase, eSaCas9 nickase eSpCas9 nickase, a HiFi Cas9 nickase, or a Cas9 H840A nickase.
   53. The method of item 1, wherein said reverse transcriptase domain comprises an M-MLV reverse transcriptase.
   54. The method of any one of items 51 to 53, wherein the nucleic acid sequence corresponding to the guide RNA or pegRNA and the nucleic acid sequence encoding the Cas nickase-reverse transcriptase fusion protein are comprised in the same vector.
   55. The method of any one of items 51 to 54, wherein the at least one modification is located in intron 15, exon 16, intron 16, exon 17 and/or intron 17 of the APP-encoding polynucleotide sequence.
   56. The method of any one of items 51 to 55, wherein said at least one modification results in at least one amino acid substitution in the region defined by amino acid positions 656 to 688 in the APP protein, wherein said amino acid positions are with respect to the APP protein sequence as set forth in SEQ ID NO: 2 (NG_007376.1; FIG. 3).
   57. The method of item 56, wherein said at least one amino acid substitution corresponds to at least one substitution at amino acid position 670, 671, 673, 678, 682, 684, 692, 693, 694, 704, 711, 712, 713, 714, 715 and/or 684 of the APP protein.
   58. The method of item 57, wherein the at least one amino acid substitution introduces a threonine at position 673.
   59. The method of item 57, wherein the at least one amino acid substitution introduces of a valine at position 673.
   60. The method of item 57, wherein the at least one amino acid substitution introduces of an arginine at position 684.
   61. The method of any one of items 55-60, wherein said at least one modification in APP gene or mRNA results in a modification of one or more amino acids recognized by an α, β, or γ secretase in the APP protein encoded by said APP polynucleotide gene or mRNA sequence present in said cell.
   62. The method of any one of items 55-60, wherein said at least one modification corrects a mutation associated with an increased risk of developing Alzheimer's disease present in said endogenous APP polynucleotide gene sequence present in said cell.
   63. The method of any one of items 55-60, wherein said at least one modification results in a mutation which reduces risk of developing Alzheimer's disease by reducing the formation or the aggregation of Amyloidogenic peptides.
   64. The method of any one of items 51-63, wherein said cell is from a subject having at least one family member which has been diagnosed with Alzheimer's disease.
   65. The method of any one of items 51-63, wherein said cell is from a subject having at least one mutation associated with early onset Alzheimer's disease.
   66. The method of any one of items 51-63, wherein said cell is from a subject having a chance of developing a sporadic form Alzheimer's disease.
   67. The method of any one of items 51 to 66, wherein the pegRNA guide sequence comprises at least 20 contiguous nucleotides of the target sequence in the endogenous APP polynucleotide gene or mRNA.
   68. The method of any one of items 51 to 67, wherein the PAM is AAA, MG, ACA, ATG, CC, CAA, CCN, GAA, GAT, GGA, GGC, GGT, GTA, GTC, GTT, TCN, NG, NGG, NNG, NAG, NGA, NNAGAA, NNGAAT, NNGAGT, NNGGAT, NNGGGT, NNNAAT NNNAGT, NNNGAT, NNNGCA, NNNGGT, NNNNACA, NNNNACAC, NNNNATAC, NNNNGAAT, NNNNGATT, NNNNGCAC, NNNNGTAC, NNNNGTAT, NNNNGTTT, TGA, TGC, TGT, TTA, TTC, TTT, TTTA or a TTTC sequence.
   69. The method of any one of items 51 to 68, wherein the APP-encoding polynucleotide is an APP gene polynucleotide or an APP mRNA.
   70. The method of any one of items 51 to 69, wherein the target sequence of said pegRNA is located in an exon or an intron of the APP-encoding polynucleotide.
   71. The method of any one of items 51-70, wherein the target sequence is located between nucleotides 270798 and 294050 of the APP gene (SEQ ID NO: 1; ACCESSION NG_007376.1).
   72. The method of any one of items 51-71, wherein said at least one pegRNA comprises the following nucleic acid sequence:

SpCas9 VQR guide RNA for A673T mutation:
(SEQ ID NO: 138)
AUUCUGCAUCCAUCUUCACUUC
SaCas9 guide RNA for A673T mutation:
(SEQ ID NO: 139)
AUUCUGCAUCCAUCUUCACUUC
Target AID_SpCas9n guide RNA for A673V mutation:
(SEQ ID NO: 140)
GCAGAAUUCCGACAUGACUC
SpCas9 guide RNA for H684R mutation:
(SEQ ID NO: 141)
UGAAGUUCAUCAUCAAAAAU
SaCas9 KKH guide RNA for H684R mutation:
(SEQ ID NO: 142)
CAUCAUCAAAAAUUGGUACG
SpCas9 for ABE6.3, ABE7.8, ABE7.9 and
ABE7.10 for the H684R mutation in the DNA
(SEQ ID NO: 143)
UGAAGUUCAUCAUCAAAAAUGUUUAAGAGCUAUGCUGG
AAACAGCAUAGCAAGUUUAAAUAAGGCUAGUCCGUUAU
CAACUUGAAAAAGUGGCACCGAGUCGGUGC
Adenosine deaminase fused with SaCas9KKH
for the H684R mutation in the DNA
(SEQ ID NO: 144)
CAUCAUCAAAAAUUGGUACGGUUUUAGUACUCUGGAAA
CAGAAUCUACUAAAACAAGGCAAAAUGCCGUGUUUAUC
UCGUCAACUUGUUGGCGAGA
SpCas13b-ADAR2_{DD} (REPAIRv2) for the
H684R mutation in the mRNA
(SEQ ID NO: 145)
GAUGACGAACUUCAUAUCCUGAGUCAUGUCGGAAUUCU
GCAUCCAUCUUC
SpCas13b-ADAR2_{DD} (REPAIRv2) for the
H684R mutation in the mRNA
(SEQ ID NO: 146)
ACCAAUUUUUGAUGACGAACUUCAUAUCCUGAGUCAUG
UCGGAAUUCUGC
ADAR2 gRNA for H684R mutation:
(SEQ ID NO: 147)
5′GUGGAAUAGUAUAACAAUAUGCUAAAUGUUGUUA
UAGUAUCCCACUUUUUGAUGACGAACUUC3′
wherein the underlined sequence is complementary to
the targeted sequence in the APP mRNA, and the
bold C is a mismatch for the nucleotide A to be
changed in a G in the APP mRNA.
REPAIRv2 gRNA for H684R mutation:
(SEQ ID NO: 148)
5′ACCAAUUUUUGAUGACGAACUUCAUAUCCUGAG
UCAUGUUGUGGAAGGUCCAGUUUUGGGGGCU
AUUACAACA3′
wherein the underlined sequence is complementary
to the targeted sequence in the APP mRNA, and the
bold C is a mismatch for the nucleotide A to be
changed in a G in the APP mRNA.

73. The method of any one of items 51 to 72, wherein the Cas nickase-reverse transcriptase fusion protein further comprises a protein transduction domain (PTD).
74. The method of any one of items 51 to 72, wherein the Cas nickase-reverse transcriptase fusion protein further comprises a nuclear localization signal (NLS).
75. The method of any one of items 51 to 74, wherein the vector is a viral vector, a virus like particle (VLP), an extra-cellular vesicle or an exosome.
76. The method of item 75, wherein said viral vector is a lentiviral vector, Adeno-Associated viral vector, adenovirus viral vector or herpes virus viral vector.
77. A pegRNA as defined in any one of items 51 to 72.
78. An isolated nucleic acid comprising a nucleotide sequence corresponding to the pegRNA of item 77 for expressing the pegRNA.
79. An isolated nucleic acid encoding the Cas nickase-reverse transcriptase fusion protein defined in any one of items 51 to 74.
80. A vector comprising the isolated nucleic acid of item 78 and/or the isolated nucleic acid of item 79.
81. The vector of item 80, wherein the vector is a viral vector, a virus like particle (VLP), an extra-cellular vesicle or an exosome.
82. The vector of item 81, wherein the viral vector is a lentiviral vector, Adeno-Associated viral vector, adenovirus viral vector or herpes virus viral vector.
83. A system comprising:
[0034] vi) the pegRNA of item 77,
[0035] vii) the Cas nickase-reverse transcriptase fusion protein defined in any one of items 51 to 74,
[0036] viii) the isolated nucleic acid of item 78 or 79,
[0037] ix) the vector of any one of items 80 to 82, or
[0038] x) any combination of (i) to (iv).
   84. A composition comprising a biologically acceptable carrier or a pharmaceutically acceptable carrier and:
[0039] vi) the pegRNA of item 77,
[0040] vii) the Cas nickase-deaminase or Cas nickase-reverse transcriptase fusion protein defined in any one of items 51 to 74,
[0041] viii) the isolated nucleic acid of item 78 or 79,
[0042] ix) the vector of any one of items 80 to 82, or
[0043] x) any combination of (i) to (iv).
   85. The pegRNA of item 77, the Cas nickase-reverse transcriptase fusion protein defined in any one of items 51 to 74, the isolated nucleic acid of item 78 or 79, the vector of any one of items 80 to 82, the system of item 83, and/or the composition of item 84 for use in decreasing Amyloid Precursor Protein (APP) processing into amyloidogenic Aβ peptide by a cell or the aggregation of the Aβ peptide.
   86. The pegRNA of item 77, the Cas nickase-reverse transcriptase fusion protein defined in any one of items 51 to 74, the isolated nucleic acid of item 78 or 79, the vector of any one of items 80 to 82, the system of item 83, and/or the composition of item 84 for the preparation of a medicament for decreasing Amyloid Precursor Protein (APP) processing into amyloidogenic Aβ peptide by a cell or the aggregation of the Aβ peptide.
   87. The pegRNA, Cas nickase-reverse transcriptase fusion protein, isolated nucleic acid, vector, system, and/or composition for use of item 85 or 86, wherein the cell is from a subject having at least one family member which has been diagnosed with Alzheimer's disease.
   88. The pegRNA, Cas nickase-reverse transcriptase fusion protein, isolated nucleic acid, vector, system, and/or composition for use of item 85 or 86, wherein the cell is from a subject having at least one mutation associated with early onset Alzheimer's disease.
   89. The pegRNA of item 77, the Cas nickase-reverse transcriptase fusion protein defined in any one of items 51 to 74, the isolated nucleic acid of item 78 or 79, the vector of any one of items 80 to 82, the system of item 83, and/or the composition of item 84 for use in treating or preventing Alzheimer's disease or age-related cognitive decline in a subject in need thereof.
   90. The pegRNA of item 77, the Cas nickase-reverse transcriptase fusion protein defined in any one of items 51 to 74, the isolated nucleic acid of item 78 or 79, the vector of any one of items 80 to 82, the system of item 83, and/or the composition of item 84 for use in the preparation of a medicament for treating or preventing Alzheimer's disease or age-related cognitive decline in a subject in need thereof.
   91. The pegRNA, Cas nickase-reverse transcriptase fusion protein, isolated nucleic acid, vector, system, and/or composition for use of item 89 or 90, wherein the subject in need thereof is a subject having at least one family member (e.g., a mother, father, brother, sister or child), who has been diagnosed with Alzheimer's disease.
   92. Use of the pegRNA of item 77, the Cas nickase-reverse transcriptase fusion protein defined in any one of items 51 to 74, the isolated nucleic acid of item 78 or 89, the vector of any one of items 80 to 82, the system of item 83, and/or the composition of item 84 for decreasing Amyloid Precursor Protein (APP) processing into amyloidogenic Aβ peptide by a cell or the aggregation of the Aβ peptide.
   93. Use of the pegRNA of item 77, the Cas nickase-reverse transcriptase fusion protein defined in any one of items 51 to 74, the isolated nucleic acid of item 78 or 89, the vector of any one of items 80 to 82, the system of item 83, and/or the composition of item 84 for the preparation of a medicament for decreasing Amyloid Precursor Protein (APP) processing into amyloidogenic Aβ peptide by a cell or the aggregation of the Aβ peptide.
   94. The use of item 92 or 93, wherein the cell is from a subject having at least one family member which has been diagnosed with Alzheimer's disease.
   95. The use of item 92 or 93, wherein the cell is from a subject having at least one mutation associated with early onset Alzheimer's disease.
   96. Use of the pegRNA of item 77, the Cas nickase-reverse transcriptase fusion protein defined in any one of items 51 to 74, the isolated nucleic acid of item 78 or 89, the vector of any one of items 80 to 82, the system of item 83, and/or the composition of item 84, for treating or preventing Alzheimer's disease or age-related cognitive decline in a subject in need thereof.
   97. Use of the pegRNA of item 77, the Cas nickase-reverse transcriptase fusion protein defined in any one of items 51 to 74, the isolated nucleic acid of item 78 or 89, the vector of any one of items 80 to 82, the system of item 83, and/or the composition of item 84, for the preparation of a medicament for treating or preventing Alzheimer's disease or age-related cognitive decline in a subject in need thereof.
   98. The use of item 96 or 97, wherein said subject in need thereof is a subject having at least one family member (e.g., a mother, father, brother, sister or child), who has been diagnosed with Alzheimer's disease.
   99. The use of item 96 or 97, wherein said subject in need thereof is a subject having at least one mutation associated with early onset Alzheimer's disease.
   100. A method of decreasing Amyloid Precursor Protein (APP) processing into amyloidogenic Aβ peptide by a cell or the aggregation of the Aβ peptide, comprising introducing into the cell or contacting the cell with the pegRNA of item 77, the Cas nickase-reverse transcriptase fusion protein defined in any one of items 51 to 74, the isolated nucleic acid of item 78 or 89, the vector of any one of items 80 to 82, the system of item 83, and/or the composition of item 84.

[0044] Other objects, advantages and features of the present disclosure will become more apparent upon reading of the following non-restrictive description of specific embodiments thereof, given by way of example only with reference to the accompanying drawings.

### BRIEF DESCRIPTION OF THE DRAWINGS

[0045] In the appended drawings:

[0046] FIG. 1 shows pathways for metabolic processing of Amyloid Precursor Protein (APP). The figure illustrates the two most prominent metabolic routes and the APP proteolytic derivatives. APP is the substrate for either α-, β- and/or γ-secretase. Thus, the two pathways (non-amyloidogenic (also called amyloidolytic) and the amyloidogenic) are mutually exclusive. 6-site APP-cleaving enzyme 1 (BACE1) is the only known aspartyl protease with β-secretase activity. The fragments C83 and C99 (also known as α- and β-carboxy-terminal fragments) are substrates for the γ-secretase, a protein complex that includes at least 4 different proteins: anterior pharynx defective 1, nicastrin, presenilin 1 (PS-1) or presenilin 2 (PS-2), and presenilin enhancer-2. AICD is the intra-cytoplasmic domain of APP. The figure was adapted from E. A. Bignante et al.⁹.

[0047] FIG. 2 is a schematic representation of the domain structure of amyloid precursor protein (APP). The E1 domain contains the Growth Factor Like Domain (GFLD) and the Copper-Binding Domain (CuBD). The acidic domain (AcD) and the Kunitz-type inhibitory domain (Kunitz protease inhibitor [KPI], not present in neurons) bridge the E1 and E2 domains. The E2 domain contains 2 coiled-coil substructures connected through a continuous helix. The amino acid sequence (SEQ ID NO: 45) of amyloid β (Aβ)/trans-membrane/intracellular (intra-cytoplasmic domain of APP [AICD]) domains is shown in the lower part of the figure. Asterisks denote amino acids substituted in familial forms of AD and APP variants. Arrows indicate cleavage sites for both secretases and caspases. Binding motifs for heterotrimeric Go/s proteins (Go/s-BM) and scaffolding proteins (SP-BM; e.g., Fe65, Mint/X11-family proteins, Dab1, c-Jun N-terminal kinase) are underlined. The Aβ sequence is also underlined. From E. A. Bignante et al.⁹.

[0048] FIG. 3 shows the complete amino acid sequence of the human Amyloid β Precursor Protein (APP) gene (SEQ ID NO: 2; NCBI Reference Sequence: NG_007376.1; nucleotide sequence shown in SEQ ID NO: 1). The bold A is alanine at position 673 to be mutated to a threonine (T) or a valine (V) to protect from Alzheimer's disease. The bold H is histidine at position 684 to be mutated to an arginine (R) to protect from Alzheimer's disease.

[0049] FIG. 4 illustrates the structure of BE3, CDA1-BE3, and Target-AID-BE3. From Komor et al.¹⁰.

[0050] FIG. 5 illustrates part of APP exon 16. A illustrates the antisense strand (SEQ ID NO: 52). There are 5 cytidines close to one another, which can be deaminated by SpCas9 base editing. The position of these 5 cytidines in the wild type exon 16 of the APP gene and the corresponding amino acid codons (from E665 to F675). B) Deamination of all 5 cytidines (C1-05) into thymidines is shown, which changes the codons and thus the resulting amino acid, except for cytidine 5 for which the change into a thymidine does not change the resulting amino acid, which remains a lysine (K). Sense strand, SEQ ID NO: 46; antisense strand, SEQ ID NO: 47; amino acid sequence SEQ ID NO: 48. C) The deamination of only cytidine 2 in the antisense codon for alanine changes the codon in position 673 into a threonine codon. The cut site of BACE1 between methionine 671 and aspartic acid 672 is indicated. Sense strand, SEQ ID NO: 49; antisense strand, SEQ ID NO: 50; amino acid sequence SEQ ID NO: 51.

[0051] FIG. 6 shows the percentages of deamination in HEK293T cells with one or two copies of guide RNA. Plasmids coding for the various cytidine deaminases and for one guide RNA (left side of the figure) or two guide RNAs (right side of the figure) were transfected into HEK293T cells. The DNA was extracted 3 days later, APP exon 16 was PCR amplified and analyzed by deep sequencing. The sequences were computer analyzed to establish the percentages of the cytidines 1 to 5 (FIG. 5; bars in each grouping correspond to C1-05 from left to right), which were changed into a thymidine with the different deaminases (BE3_SpCas9nVQR with a guide RNA targeting 20 nucleotides, BE3_SpCas9nVQR with a guide RNA targeting 21 nucleotides).

[0052] FIG. 7 shows the percentages of deamination in SH-SY5Y and HEK293T cells with two copies of guide RNA. Plasmids coding for various deaminase enzymes and two copies of the guide RNA were transfected in SH-SY5Y neuroblastomas (left side) and in HEK293T cells (right side). The guide RNAs were targeting either 19, 20, 21 or 22 nucleotides. The DNA was extracted 3 days later, APP exon 16 was PCR amplified and analyzed by deep sequencing. The sequences were computer analyzed to establish the percentages of the cytidines 1 to 5 (FIG. 5; bars in each grouping correspond to C1-05 from left to right), which were changed into a thymidine with different deaminases (Target-AID-SpCas9nEQR, Target-AID-SpCas9nVQR, BE3_SpCas9nVQR).

[0053] FIG. 8 shows the percentages of deamination in SH-SY5Y cells with two copies of guide RNA. Plasmids coding for various deaminases and a guide RNA were transfected in SH-SY5Y neuroblastomas. The guide RNAs were targeting either 19, 20, 21 or 22 nucleotides. The DNA was extracted 3 days post-transfection, APP exon 16 was PCR amplified and analyzed by deep sequencing. The sequences were computer analyzed to establish the percentages of the cytidines 1 to 5 (FIG. 5; bars in each grouping correspond to C1-05 from left to right), which were changed into a thymidine with two different deaminases (YE1-BE3_SpCas9nVQR and BE3_SpCas9nVQR).

[0054] FIG. 9 shows the percentages of deamination in SH-SY5Y cells with two copies of guide RNA. Plasmids coding for various deaminases and two copies of a guide RNA were transfected in SH-SY5Y neuroblastomas. The guide RNAs were targeting 19 nucleotides. The DNA was extracted 3 days later, APP exon 16 was PCR amplified and analyzed by deep sequencing. The sequences were computer analyzed to establish the percentages of the cytidines 1 to 5 (FIG. 5; bars in each grouping correspond to C1-05 from left to right), which were changed into a thymidine with two different deaminases (BE3_SpCas9nEQR, BE3_SpCas9nVQR, BE3_SaCas9nKKH). “Not treated” shows the results in cells that were not transfected.

[0055] FIG. 10 shows the percentages of deamination in SH-SY5Y cells with two copies of guide RNA. Plasmids coding for various deaminases and two copies of a guide RNA were transfected in SH-SY5Y neuroblastomas. The guide RNAs were targeting 17, 18, 19, 20 nucleotides. The DNA was extracted 3 days later, APP exon 16 was PCR amplified and analyzed by deep sequencing. The sequences were computer analyzed to establish the percentages of the cytidines 1 to 5 (FIG. 5; bars in each grouping correspond to C1-05 from left to right), which were changed into a thymidine with two different deaminases (Target-AID-SpCas9nVQR and BE3_SpCas9nVQR). The WT illustrates the results in cells that were not transfected.

[0056] FIG. 11 shows the percentages of deamination in HEK293T cells with two copies of guide RNA. Plasmids coding for the Target-AID-SpCas9nVQR enzyme and two copies of a guide RNA were transfected in HEK293T cells. The guide RNAs were targeting 19, 20, 21 and 22 nucleotides. The DNA was extracted 3 days later, APP exon 16 was PCR amplified and analyzed by deep sequencing. The sequences were computer analyzed to establish the percentages of the cytidines 1 to 5 (FIG. 5; bars in each grouping correspond to C1-05 from left to right), which were changed into a thymidine. More than 50% of the cytidines 1 and 2 (FIG. 5) were deaminated with 19 bp guide RNAs.

[0057] FIG. 12 shows the percentages of deamination in SH-SY5Y cells. SH-SY5Y cells were transfected with one APP plasmid containing a FAD mutation and with the Target-AID-SpCas9n_{VQR} plasmid containing two copies of the guide RNA targeting 19 nucleotides. The deep sequencing results showed a strong global deamination activity.

[0058] FIG. 13 shows the percentages of deamination in SH-SY5Y cells. SH-SY5Y cells were transfected with one APP plasmid containing a FAD mutation and with the Target-AID-SpCas9n_{VQR} plasmid containing two copies of the guide RNA targeting 19 nucleotides. Different deamination profiles were obtained with APP plasmids containing different FAD mutations. Bars in each grouping correspond to C1-05 from left to right. Indeed, C1 was not as frequently deaminated as C2. The ten best FAD mutations showed between 5.3-19.4% deamination of C2.

[0059] FIG. 14 shows the effect of deamination of C2 on Aß42 peptide levels in SH-SY5Y cells. SH-SY5Y cells containing the Target-AID-SpCas9n_{VQR} transgene and a sequence coding for guide RNA targeting 17 or 19 nucleotides were transfected with a plasmid containing the wild type APP gene alone (left side) or co-transfected with plasmids coding for the wild type APP gene and a guide RNA (right side) to permit the deamination of the C2 nucleotide and thus induce the A673T mutation. The induction of the A673T mutation reduced by 40% the concentration of Aß42 peptides in the APP WT-transfected cell supernatant, by 43% the concentration of Aß42 peptides in the APP NL/F/G-transfected cell supernatant and by 24% the concentration of Aß42 peptides in the APP V717I-transfected cell supernatant.

[0060] FIG. 15 illustrates the end of exon 16 and the beginning of intron 16 of the APP gene. The amino acids corresponding to each codon are illustrated at the bottom. The codons for alanine in position 673 and for histidine in position 684 are indicated. The positions of the NGAN PAM for the SpCas9nVQR permitting to test several cytidine deaminases (i.e., BE3_SpCas9nVQR, the YE1-BE3_SpCas9nVQR, BE4-Gam_SpCas9nVQR and the Target-AID_SpCas9nVQR) to deaminate the cytidine into a thymidine in the alanine codon (GCA) to produce the GTA codon for valine. The figure also illustrates the position of a NGG PAM and of a NNNAAT PAM, which permit to deaminate the adenosine into an inosine (equivalent to a guanine) modify the histidine codon (CAT) into a CGT codon for arginine with appropriate adenosine deaminases.

[0061] FIG. 16 illustrates the percentages of a cytidine deamination in an experiment aiming to modify the alanine (at position 673) codon (GCA) into a valine codon (GTA) by deaminating the cytidine no 1 (in position 2 of the protospacer sequence) into a thymidine. 27.82% of the C were changed into a T using the Target-AID_SpCas9n. A very low percentage (0.27%) of the second C in the protospacer motif were changed into a T. The other cytidine deaminases had very low effects. In a second experiment using the Target-AID_SpCas9n 18.48% of the first C were deaminated.

[0062] FIG. 17 illustrates the percentages of an adenosine deamination using ADAR2 to modify the histidine (at position 684) codon (CAT) into an arginine codon (CGT). Two different guide RNAs were used. For the first guide RNA the A to be deaminated was in position 35 and for the second guide RNA the A to be deaminated was in position 45. The guide RNA with the A in position 35 gave better results than the guide RNA with the A in position 45.

[0063] FIG. 18 illustrates the end of exon 16 and the beginning of intron 16 of the APP gene (sense sequence, SEQ ID NO: 39; antisense sequence, SEQ ID NO: 40; amino acid sequence, SEQ ID NO: 41). The amino acids corresponding to each codon are illustrated at the bottom. The codons for alanine in position 673 and for histidine in position 684 are indicated. The positions of the NGAN PAM for the SpCas9nVQR permitting to test several cytidine deaminases (i.e., BE3_SpCas9nVQR, the YE1-BE3_SpCas9nVQR, BE4-Gam_SpCas9nVQR and the Target-AID_SpCas9nVQR) to deaminate the cytidine into a thymidine in the alanine codon (GCA) to produce the GTA codon for valine. The figure also illustrates the position of a NGG PAM and of a NNNAAT PAM, which permit to deaminate the adenosine into an inosine (equivalent to a guanine) modify the histidine codon (CAT) into a CGT codon for arginine with appropriate adenosine deaminases . . . .

[0064] FIG. 19 illustrates the results of a cytidine deaminase experiment aiming to modify the alanine (at position 673) codon (GCA) into a valine codon (GTA) by deaminating the cytidine no 1 (in position 2 of the protospacer sequence) into a thymidine. 27.82% of the C were changed into a T using the Target-AID_SpCas9n. A very low percentage (0.27%) of the second C in the protospacer motif were changed into a T. The other cytidine deaminase has very low effects. In a second experiment using the Target-AID_SpCas9n 18.48% of the first C were deaminated.

[0065] FIG. 20 illustrates the results of an adenosine deaminase (ADAR2) experiment aiming to modify the histidine (at position 684) codon (CAT) into an arginine codon (CGT). Two different gRNAs were used. For the first gRNA the A to be deaminated was in position 35 and for the second gRNA the A to be deaminated was in position 45. The gRNA with the A in position 35 gave better results than the gRNA with the A in position 45.

[0066] FIG. 21 shows the nucleotide (SEQ ID NO: 42) and amino acid (SEQ ID NO: 43) sequences of exon 16 from APP (NCBI Reference sequence NG_007376.1). A673 and H684 are shown in bold.

[0067] FIG. 22 shows a partial sequence of the wild type APP gene (nucleotides 277141 to 279540 of NCBI NG_007376.1/GI: 166795291, SEQ ID NO: 44; full APP gene sequence in SEQ ID NO: 1) which includes a partial sequence of intron 15, followed by the complete sequence of exon 16 (nucleotides 278148-278248) and a partial sequence of intron 16.

### DESCRIPTION OF ILLUSTRATIVE EMBODIMENTS

### Definitions

[0068] The use of the terms “a” and “an” and “the” and similar referents in the context of describing the technology (especially in the context of the following claims) are to be construed to cover both the singular and the plural, unless otherwise indicated herein or clearly contradicted by context.

[0069] The use of the word “a” or “an” when used in conjunction with the term “comprising” in the claims and/or the specification may mean “one”, but it is also consistent with the meaning of “one or more”, “at least one”, and “one or more than one”. Similarly, the word “another” may mean at least a second or more.

[0070] As used in this specification and claim(s), the words “comprising” (and any form of comprising, such as “comprise” and “comprises”), “having” (and any form of having, such as “have” and “has”), “including” (and any form of including, such as “include” and “includes”) or “containing” (and any form of containing, such as “contain” and “contains”) are to be construed as open-ended terms (i.e., meaning “including, but not limited to”) unless otherwise noted.

[0071] Recitation of ranges of values herein are merely intended to serve as a shorthand method of referring individually to each separate value falling within the range, unless otherwise indicated herein, and each separate value is incorporated into the specification as if it were individually recited herein. All subsets of values within the ranges are also incorporated into the specification as if they were individually recited herein.

[0072] All methods or processes described herein can be performed in any suitable order unless otherwise indicated herein or otherwise clearly contradicted by context. Further, in embodiments various steps may be repeated, to increase recovery and purification.

[0073] The use of any and all examples, or exemplary language (e.g., “such as”) provided herein, is intended merely to better illuminate the disclosure and does not pose a limitation on the scope of the disclosure unless otherwise claimed.

[0074] No language in the specification should be construed as indicating any non-claimed element as essential to the practice of the disclosure.

[0075] As used herein when referring to numerical values or percentages, the term “about” has its ordinary meaning, and includes variations due to the methods used to determine the values or percentages, statistical variance and human error. Moreover, each numerical parameter in this application should at least be construed in light of the number of reported significant digits and by applying ordinary rounding techniques. In embodiments, it may mean plus or minus 10% of the numerical value qualified.

[0076] Unless otherwise defined, all technical and scientific terms used herein have the same meaning as commonly understood by one of ordinary skill in the art to which this disclosure belongs.

[0077] It is to be understood that the present disclosure is not limited to the particular embodiments described below, as variations of these embodiments may be made and still fall within the scope of the present disclosure. It is also to be understood that the terminology employed is for the purpose of describing particular embodiments; and is not intended to be limiting.

[0078] In order to provide a clear and consistent understanding of the terms used in the present specification, a number of definitions are provided below. Moreover, unless defined otherwise, all technical and scientific terms as used herein have the same meaning as commonly understood to one of ordinary skill in the art to which this disclosure pertains.

[0079] As used herein when referring to numerical values or percentages, the term “about” includes variations due to the methods used to determine the values or percentages, statistical variance and human error. Moreover, each numerical parameter in this application should at least be construed in light of the number of reported significant digits and by applying ordinary rounding techniques.

[0080] The present disclosure relates to the targeted modification of the Amyloid β Precursor Protein (APP) gene, in embodiments modification of a wild type APP gene or an APP gene containing a Familial Alzheimer Disease (FAD) mutation, to introduce one or more protective mutations that may protect against Alzheimer disease (AD) and/or age-related cognitive decline or impairment. In embodiments, one to three protective mutations may be introduced. In embodiments, such protective mutations include: the Icelandic mutation (A673T)^{11,12,} the A673V^{13, 14} mutation and the H684R¹⁵ mutation. The A673T mutation reduces the secretion and accumulation of the toxic amyloid β peptide (Aβ1-42) in human cells^{11, 12}. The H684R¹⁵ facilitate the cleavage of the APP protein by BACE1 in the β′ position thus increasing the formation of Aβ11-xx peptides, which are non-amyloidogenic. The A673V^{13, 14} mutation also prevents AD only in heterozygote carriers by making the amyloid bodies less stable.

[0081] In embodiments, the present disclosure relates to modification of exon 16 of an APP gene at one or more nucleotide pairs, to convert C/G to T/A and/or A/T to G/C. In embodiments, such modifications result in an Alanine to Threonine or Valine change at position 673 and/or a Histidine to Arginine change at position 684. The latter modification of a Histidine in position 684 into an Arginine was also done in APP mRNA.

[0082] In an aspect, the present disclosure relates to introducing one or more modifications into the APP gene or mRNA by base or prime editing using site-specific cytidine or adenosine deaminases. The modifications introduced are designed to decrease the production of amyloidogenic Aβ peptides (e.g., by reducing APP protein processing by BACE1, by favoring the formation of non-amyloidogenic peptides or decreasing the stability of the amyloid bodies). In an aspect, a guide RNA may be designed and used in combination with a Cas9 nickase fused with a cytidine deaminase or a reverse transcriptase enzyme to specifically modify a cytidine (C) into a thymidine (T) in the targeted APP gene. In another aspect of the invention, a guide RNA may be designed and used in combination with a Cas9 nickase fused with an adenosine deaminase or a reverse transcriptase enzyme to specifically modify an adenosine (A) into an inosine (I), which is similar to a guanine (G) in the targeted APP gene. The latter modification may also be made in the APP mRNA with the REPAIRv2¹⁶ or the ADAR2 enzyme¹⁷. The target gene or mRNA thus modified, will ultimately reduce the level or the aggregation of amyloidogenic Aβ peptides produced by the cell. The present disclosure further relates to uses of such guide RNAs, site-specific cytidine or adenosine deaminase or REPAIRv2 or ADAR2 for decreasing Aβ-peptide expression/levels in a cell. The present disclosure also concerns uses of such guide RNAs, site-specific cytidine or adenosine deaminases, REPAIRv2 and ADAR2 for the prevention or treatment of Alzheimer's disease and/or age-related cognitive decline.

[0083] Accordingly, in an aspect, the present disclosure provides a method for decreasing APP protein processing into Aβ peptide by a cell comprising introducing at least one modification in the cell genome or in the cell mRNAs, wherein the modification decreases the amount or the aggregation of amyloidogenic Aβ peptides produced by the cell.

[0084] In an embodiment, the target gene encodes the APP protein.

Mutations of APP that are Responsible for Early Onset Familial Alzheimer's Disease

[0085] Over thirty coding mutations in the APP gene have been identified⁶. Twenty-five of these mutations are pathogenic, usually resulting in early onset autosomal dominant familial Alzheimer's disease (FAD) (FIG. 2). Substitutions at or near the β- and γ-proteolytic sites result in over-production of either total Aβ or a shift in the Aβ1-40:Aβ1-42 ratio towards formation of the more amyloidogenic Aβ1-42 peptide. On the other hand, substitutions within the amyloid-β peptides result in formation of Aβ peptides, which aggregate more easily¹⁸. Mutations in APP gene are also responsible for the common late-onset form of AD. Each of these pathogenic mutations may be corrected by base or prime editing.

Mutations that are Protective Against Alzheimer's Disease (AD): A673T, A673V and H684R

[0086] A673T mutation: Jonsson et al.¹² searched for low-frequency variants in the APP gene, which significantly reduce the risk of Alzheimer's disease. They studied coding variants in APP in whole-genome sequence data obtained from 1,795 Icelanders. They reported a coding mutation, i.e., an alanine to threonine substitution at position 673 in the APP gene (A673T), which protects against AD. This mutation is adjacent to the aspartyl protease β-site in APP and is located at position 2 in the Aβ peptide, and the proximity of A673T mutation to the proteolytic site of BACE1 may suggest that this variant may result in impaired BACE1 cleavage of APP. The A673T mutation reduces by about 40% the formation of Aβ peptides in vitro¹². The strong protective effect of the A673T mutation against AD provided a proof of principle that reducing the β-cleavage of APP may protect against the disease. Moreover, the A673T mutation also protects against cognitive decline in the elderly without a familial form of AD. The carriers of the A673T mutation have a 1.47 times greater chance of reaching the age of 85 than non-carriers. Jonsson et al.¹² concluded that the A673T mutation confers a strong protection against AD. Kero et al.¹¹ found the A673T variant in one person who died at the age of 104.8 years with little β-amyloid pathology. This observation supports the concept that this variant protects the brain against β-amyloid pathology and AD.

[0087] A673V mutation: Di Fede et al.¹⁹ found that the A673V mutation causes a FAD only in the homozygous state consistent with a recessive inheritance. The A673V APP mutation enhances β-amyloid (Aβ) production and markedly increases the aggregation and fibrilogenic properties of both Aβ1-40 and Aβ1-42^{14, 19, 20}. However, co-incubation of mutated and wild-type peptides confers instability to the Aβ aggregates and thus inhibits amyloidogenesis and neurotoxicity^{13, 21, 22.} The highly amyloidogenic effect of the A673V mutation in the homozygous state and its anti-amyloidogenic effect in the heterozygous state account for the autosomal recessive pattern of inheritance. Cimini et al.²² fused the first six residues of the Aβ1-42A2V to TAT (Aβ1-6A2VTAT(D)) to generate a cell permeable peptide, which conferred in vitro and in vivo neuroprotection against synaptopathy.

[0088] H684R mutation: The β′ site cleavage of mouse APP is more common than the corresponding cleavage of human APP. Thus normal mice do not accumulate β amyloid plaques and to not develop AD. There are three amino acids that differ between the human and the mouse APP protein near the β and β′ sites (i.e., Arg at position 676 in human APP (hAPP) is Gly (R676G) in mouse APP, Tyr681 is Phe (Y681F), and His at position 684 is Arg (H684R). Kimura et al.¹⁵ found that the H684R substitution within human APP protein, facilitated cleavage at the β′ site irrespective of the species origin of BACE1, thereby significantly increasing the level of amyloidolytic Aβ11-XX and decreasing the level of the amyloidogenic Aβ1-XX.

[0089] In an embodiment, the methods described herein comprise providing the cell with a site-specific cytidine deaminase, adenosine deaminase or Cas-nickase-reverse transcriptase specifically targeting a nucleic acid sequence in the endogenous APP polynucleotide gene or mRNA sequence of the cell.

[0090] In an embodiment, the site-specific endonuclease is a Cas9 nickase fused with a cytidine deaminase (e.g., APOBEC1 (apolipoprotein B editing complex 1) or Target-AID) or an adenosine deaminase such as ABE7.10²³, REPAIRv2¹⁶ or ADAR2¹⁷ or a reverse transcriptase²⁴.

[0091] In an embodiment, the at least one modification induced by the cytidine or adenosine deaminase or reverse transcriptase results in an APP polynucleotide gene sequence encoding an APP protein in which the alanine at position 673 and/or the histidine in position 684 has been substituted by another amino acid. In an embodiment, the at least one modification changes the alanine at position 673 of the APP protein into a threonine or a valine, and/or changes the histidine in position 684 into an arginine. In another embodiment, the at least one modification induced by the cytidine or adenosine deaminase complex, the REPAIRv2 or the ADAR2 results in a modification of one or more amino acids recognized by an α, β, or γ secretase in the APP protein encoded by the APP polynucleotide gene sequence. In an embodiment, the at least one modification reduces the risk of developing Alzheimer's disease.

[0092] In an embodiment, the site-specific cytidine or adenosine deaminase is a Cas nickase (e.g., derived from either SpCas9, SaCas9, CjCas9, ScCas9, CasX, CasY, Cpf1, eSpCas9, eSaCas9, HiFi Cas9™ (IDT Inc.)), fused to an ADAR2 deaminase or a REPAIRv2 deaminase and the method further comprises providing the cell with at least on one guide RNA comprising a nucleotide seed region complementary to a target sequence in the endogenous APP polynucleotide gene or mRNA sequence of the cell.

[0093] In an embodiment, the guide RNA comprises a nucleotide seed region of at least 8 nucleotides perfectly complementary to the target nucleic acid sequence in the endogenous APP polynucleotide gene, wherein the target nucleic acid sequence is immediately adjacent to a protospacer adjacent motif (PAM) recognized by a Cas ribonucleoprotein complex comprising the Cas9 nickase derived from a Cas9 nuclease (e.g., SpCas9, SaCas9, ScCas9, CasX, CasY, Cpf1, eSpCas9, eSaCas9, HiFi Cas9™). The sequences coding for some of these enzymes have been optimized for humans: hSpCas9, hSaCas9, hCjCas9.

[0094] In embodiments, the PAM comprises a AAA, AAG, ACA, ATG, CC, CM, CCN, GM, GAT, GGA, GGC, GGT, GTA, GTC, GTT, TCN, NG, NGG, NNG, NAG, NGA, NNAGAA, NNGAAT, NNGAGT, NNGGAT, NNGGGT, NNNAAT NNNAGT, NNNGAT, NNNGCA, NNNGGT, NNNNACA, NNNNACAC, NNNNATAC, NNNNGAAT, NNNNGATT, NNNNGCAC, NNNNGTAC, NNNNGTAT, NNNNGTTT, TGA, TGC, TGT, TTA, TTC, TTT, TTTA or a TTTC sequence.

[0095] In an embodiment, the target nucleic acid sequence of the above-mentioned guide RNA is located in the APP polynucleotide gene sequence.

[0096] In an embodiment, the above-mentioned target nucleic acid sequence of the guide RNA comprises the following nucleic acid sequence of the human APP polynucleotide gene sequence having reference number NCBI NG_007376.1. (The PAM sequence is in bold)

For the A673T mutation:
(SEQ ID NO: 53)
ATTCTGCATCCATCTTCACTTCAGAG
(SEQ ID NO: 54)
TTCTGCATCCATCTTCACTTCAGAG
(SEQ ID NO: 55)
TCTGCATCCATCTTCACTTCAGAG
(SEQ ID NO: 56)
CTGCATCCATCTTCACTTCAGAG
(SEQ ID NO: 57)
TGCATCCATCTTCACTTCAGAG
(SEQ ID NO: 58)
GCATCCATCTTCACTTCAGAG
(SEQ ID NO: 59)
ATTCTGCATCCATCTTCACTTCAGAGAT
(SEQ ID NO: 60)
TTCTGCATCCATCTTCACTTCAGAGAT
(SEQ ID NO: 61)
TCTGCATCCATCTTCACTTCAGAGAT
(SEQ ID NO: 62)
CTGCATCCATCTTCACTTCAGAGAT
(SEQ ID NO: 63)
TGCATCCATCTTCACTTCAGAGAT
(SEQ ID NO: 64)
GCATCCATCTTCACTTCAGAGAT
(SEQ ID NO: 65)
ATTCTGCATCCAGATTCACTTCAGAG
(SEQ ID NO: 66)
TTCTGCATCCAGATTCACTTCAGAG
(SEQ ID NO: 67)
TCTGCATCCAGATTCACTTCAGAG
(SEQ ID NO: 68)
CTGCATCCAGATTCACTTCAGAG
(SEQ ID NO: 69)
TGCATCCAGATTCACTTCAGAG
(SEQ ID NO: 70)
GCATCCAGATTCACTTCAGAG
(SEQ ID NO: 71)
ATTCTGCATCCAGATTCACTTCAGAGAT
(SEQ ID NO: 72)
TTCTGCATCCAGATTCACTTCAGAGAT
(SEQ ID NO: 73)
TCTGCATCCAGATTCACTTCAGAGAT
(SEQ ID NO: 74)
CTGCATCCAGATTCACTTCAGAGAT
(SEQ ID NO: 75)
TGCATCCAGATTCACTTCAGAGAT
(SEQ ID NO: 76)
GCATCCAGATTCACTTCAGAGAT
For the A673V mutation:
(SEQ ID NO: 77)
ATGGATGCAGAATTCCGACATGAC
(SEQ ID NO: 78)
TGGATGCAGAATTCCGACATGAC
(SEQ ID NO: 79)
GGATGCAGAATTCCGACATGAC
(SEQ ID NO: 80)
GATGCAGAATTCCGACATGAC
(SEQ ID NO: 81)
ATGCAGAATTCCGACATGAC
(SEQ ID NO: 82)
TGCAGAATTCCGACATGAC
For the H684R mutation:
(SEQ ID NO: 83)
TGAAGTTCATCATCAAAAATTGG
(SEQ ID NO: 84)
GAAGTTCATCATCAAAAATTGG
(SEQ ID NO: 85)
AAGTTCATCATCAAAAATTGG
(SEQ ID NO: 86)
AGTTCATCATCAAAAATTGG
(SEQ ID NO: 87)
GTTCATCATCAAAAATTGG
(SEQ ID NO: 88)
TTCATCATCAAAAATTGG
(SEQ ID NO: 89)
CATCATCAAAAATTGGTACGTAAAAT
(SEQ ID NO: 90)
ATCATCAAAAATTGGTACGTAAAAT
(SEQ ID NO: 91)
TCATCAAAAATTGGTACGTAAAAT
(SEQ ID NO: 92)
CATCAAAAATTGGTACGTAAAAT
(SEQ ID NO: 93)
ATCAAAAATTGGTACGTAAAAT
(SEQ ID NO: 94)
TCAAAAATTGGTACGTAAAAT

[0097] In an embodiment, the at least one modification within the endogenous APP polynucleotide gene sequence of the cell is introduced by base or prime editing.

[0098] In another aspect, the present disclosure provides a guide RNA as defined herein, which in embodiments can be used in the methods described herein. The present disclosure also provides a vector comprising a nucleic acid encoding a guide RNA or a pegRNA described herein. Also provided are cells comprising such a nucleic acid or vector. In an embodiment, the vector is a viral vector. In an embodiment, the viral vector is a lentiviral vector, Adeno-Associated viral (AAV) vector, adenovirus viral vector or herpes virus vector. In an embodiment, the vectors are virus like particles (VLPs), extra-cellular vesicles or exosomes.

[0099] In a particular embodiment, the above-mentioned vectors further comprise a nucleic acid encoding a site-specific deaminase or reverse transcriptase. In an embodiment, the vector further comprises a nucleic acid encoding a nickase Cas9 fused with a cytidine deaminase, an adenosine deaminase or a reverse transcriptase, a REPAIRv2 adenosine deaminase or ADAR2 adenosine deaminase.

[0100] In a further aspect, the present disclosure relates to a composition comprising: i) one or more of the above-mentioned guide RNAs or pegRNAs, ii) a cytidine deaminase, an adenosine deaminase or a reverse transcriptase, iii) one or more of the above-mentioned vectors, and a carrier, such as a biologically acceptable carrier or a pharmaceutically acceptable carrier.

[0101] In an embodiment, the composition further comprises a site-specific deaminase or reverse transcriptase or a nucleic acid encoding a site-specific deaminase or reverse transcriptase. In an embodiment, the site-specific deaminase is an inactive Cas9 nuclease or nickase fused with a cytidine deaminase, an adenosine deaminase or a reverse transcriptase.

[0102] In an embodiment, the present relates to the above-mentioned guide RNAs or pegRNAs, nucleic acids vectors, host cells and/or compositions for use in decreasing Amyloid Precursor Protein (APP) processing into amyloidogenic Aβ peptides by a cell, or for decreasing the production of amyloidogenic Aβ peptides by a cell.

[0103] In another embodiment, the present disclosure concerns the above-mentioned guide RNAs or pegRNAs, nucleic acids, vectors, host cells and/or compositions for use in treating or preventing Alzheimer's disease or age-related cognitive decline in a subject in need thereof.

[0104] In a related aspect, the present disclosure concerns the above-mentioned guide RNAs or pegRNAs, vectors, host cells and/or compositions for the preparation of a medicament for decreasing Amyloid Precursor Protein (APP) processing into amyloidogenic Aβ peptides by a cell.

[0105] The present disclosure also concerns the above-mentioned guide RNAs or pegRNAs, deaminases or reverse transcriptase, vectors, host cells and/or compositions for the preparation of a medicament for treating or preventing Alzheimer's disease or age-related cognitive decline in a subject in need thereof.

[0106] The present disclosure further concerns the use of the above-mentioned guide RNAs or pegRNAs, deaminases or reverse transcriptase, vectors, host cells and/or compositions for decreasing Amyloid β Precursor Protein (APP) processing into Aβ peptide by a cell.

[0107] In another embodiment, the present disclosure relates to the use of the above-mentioned guide RNAs or pegRNAs, deaminases or reverse transcriptase, vectors, host cells and/or compositions for preventing or treating Alzheimer's disease or age-related cognitive decline in a subject in need thereof.

[0108] In another embodiment, the present disclosure relates to a method of preventing or treating Alzheimer's disease or age-related cognitive decline in a subject in need thereof, comprising introducing into or contacting a cell of the subject with the above-mentioned guide RNAs or pegRNAs, deaminases or reverse transcriptase, vectors, host cells and/or compositions.

[0109] In an embodiment of the above-mentioned methods, the cell is from subject in need thereof. In a particular embodiment, the subject in need thereof is a subject at risk of developing Alzheimer's disease.

[0110] The present disclosure shows that it is possible to introduce one or more modifications into a target gene or mRNA involved in Aβ peptide production by gene editing using one or more site-specific deaminases or reverse transcriptase. The modifications introduced are specifically designed to decrease the production of amyloidogenic Aβ peptides.

[0111] Applicants show herein that the endogenous APP polynucleotide gene or mRNA sequence within a cell may be efficiently genetically modified to introduce one or more modifications designed to decrease amyloidogenic Aβ-peptide production. The modifications are introduced by providing the cell with a site-specific deaminase or reverse transcriptase specifically targeting the endogenous APP polynucleotide gene or mRNA sequence.

[0112] A deamination reaction is produced by the site-specific deaminase in the endogenous APP polynucleotide gene or mRNA sequence thereby modifying it.

[0113] Using such methods, modifications into the target gene or mRNA can be made to correct an endogenous mutation associated with increased risk of amyloidogenic Aβ peptide production or accumulation or to introduce one or more modifications which decrease APP expression or processing into amyloidogenic Aβ peptides or production of amyloidogenic Aβ peptides.

[0114] For example, mutations in the APP gene associated with familial forms of Alzheimer's disease may be corrected in accordance with the present disclosure by targeting the endogenous APP gene or mRNA with a deaminase or reverse transcriptase changing the mutated codon to the wild-type one. In another aspect of the present disclosure, the APP gene may be modified to introduce a protective mutation into the APP gene associated with decreased levels of amyloidogenic Aβ-peptide production or accumulation.

[0115] As used herein, the terms “APP gene”, “APP nucleic acid” and APP polynucleotide sequence” are used interchangeably and refer to the nucleic acid sequence encoding the Amyloid Precursor Protein (Entrez 351; Ensembl ENSG00000142192; UniProt P05067; RefSeq mRNA NM_000484; RefSeq (protein) NP_000475). A wild-type APP nucleic acid is a nucleic acid, which has the nucleotide sequence of the APP gene naturally found in subjects and which does not comprise mutations (in the coding region of the APP protein or elsewhere in the APP gene), which are associated with an increased risk of developing Alzheimer's disease. A wild type APP nucleic acid thus includes allelic variants not associated with familial forms of Alzheimer's disease and encodes the wild type APP protein (e.g., NM_000484.3; Uniprot P05067, and FIG. 3). In a particular embodiment, the wild type APP nucleic acid sequence has the sequence of NCBI Reference Sequence: NG_007376.1 (SEQ ID NO: 1; Exons: 4995 . . . 5251, 63670 . . . 63837, 85745 . . . 85874, 122469 . . . 122581, 124624 . . . 124817, 153775 . . . 153977, 175636 . . . 175803, 178402 . . . 178458, 193343 . . . 193476, 199792 . . . 199866, 200592 . . . 200750, 220064 . . . 220192, 221130 . . . 221229, 263859 . . . 264080, 270744 . . . 270797, 278148 . . . 278248, 283953 . . . 284099, 294051 . . . 295272). An endogenous APP polynucleotide gene sequence in a cell refers to the unmodified APP nucleic acid sequence found in such cell.

[0116] Many mutations causing Alzheimer's disease have been reported in the APP gene and these may be corrected in accordance with the present disclosure. In a particular aspect of the present disclosure, the correction involves the replacement of the mutated nucleotide(s) with nucleotide(s) normally found in the APP gene. In another aspect, the correction involves the replacement of the mutated nucleotides with nucleotides encoding the wild type amino acids of the APP protein. In such a case, the replacement nucleotides may be the same as those found in the wild type APP nucleic acid sequence or may be different (e.g., due to codon degeneracy), as long as the corrected sequence encodes the wild type APP protein. Mutations in the exons encoding the APP protein, in the promoter or in any other regulatory sequence in the APP gene modulating the expression of the APP protein may be targeted in accordance with the present disclosure. For example, mutations in any of the 18 exons of the APP gene may be targeted and corrected in accordance with the present disclosure (i.e., mutations in exon 1, exon 2, exon 3, exon 4, exon 5, exon 6, exon 7, exon 8, exon 9, exon 10, exon 11, exon 12, exon 13, exon 14, exon 15, exon 16, exon 17 and exon 18). Modifications introduced in the portion of the polynucleotide gene sequence encoding the APP protein (e.g., exon sequences) will be reflected in the APP protein expressed by the cell (i.e., the cell will normally express a modified/corrected APP protein).

[0117] Non-limiting examples of mutations in the APP protein that may be corrected include: KM670/671NL (12), Ala673Val (13), His677Arg (14), Asp678Asn (15), Asp678His (16), Glu682Lys (17), Ala692Gly (18), Glu693Gln (19), Glu693Gly (20), Glu693del (21), Asp694Asn (22), Leu705Val (23), Ala713Thr (24), Ala713Thr (25), Ala713Val (26), Thr714Ala (27), Thr714Ile (28), Val715Met (29), Ile716Val (30), Ile716Phe (31), Val717Ile (32), Val717Leu (33), Val717Phe (34), Val717Gly (35), Leu723Pro (36), Lys724Asn (37) and His733Pro (38). All mutations located between amino acids 656 and 688 are located in exon 16 of the APP gene. This exon has been shown to be efficiently targeted and replaced using an embodiment of the method of the present disclosure.

[0118] Other mutations associated with Alzheimer's disease, such as those found in the Presenilin 1 (PS1) and Presenilin 2 (PS2) genes may also be corrected using the methods described herein.

[0119] In addition to correcting mutations associated with increased risk of developing Alzheimer's disease (e.g., mutations associated with familial forms of AD), it is also possible to introduce one or more modifications into the APP gene, which are known to protect against Alzheimer's disease. One such modification is the replacement of the alanine at position 673 of the APP protein sequence with a threonine (A673T substitution in exon 16). The presence of the A673T variant in subjects has been found to reduce the risk of developing Alzheimer's disease and to protect against age-related cognitive decline. The A673T substitution is adjacent to the β-secretase cleavage site in APP and results in a 40% reduction in the formation of toxic amyloid-6 peptides in 293T cells. A second modification is the replacement of the alanine at position 673 of the APP protein sequence with a valine (A673V substitution in exon 16). Although the A673V mutation induces Alzheimer disease when the patient is homozygous for the mutation, this mutation in heterozygous humans is protective against AD^{13-15, 22}. A third modification is the replacement of the histidine at position 684 of the APP protein sequence with an arginine (H684R substitution in exon 16). BACE1 normally cuts in human APP protein between amino acid methionine at position 671 and asparagine at position 672, the H684R mutation favors the cutting by between amino acid tyrosine at position 681 and glutamic acid at position 682 thus leading to the formation of shorter A1111-xx peptides which are not amyloidogenic¹⁵.

[0120] Introduction of the A673T, A673V or H684H substitution in accordance with the present disclosure may be made alone in the APP gene, or in combination with one or more other modifications aiming, for example, either at correcting endogenous mutations associated with an increased risk of developing AD or age-related cognitive decline or at introducing mutations, which are preventing AD. For example, mutations associated with increased risk of developing AD present in exon 16 may advantageously be corrected at the same time as the A673T, A673V or H684H protective substitution is introduced in the APP gene. Of course, mutations located elsewhere (i.e., in exons other than exon 16) may also be concurrently corrected.

[0121] Modifications in the APP gene or other genes associated with AD may be made in cells (neurons) of a subject in need thereof. As used herein, “a subject in need thereof” is a subject, which may benefit from a decreased production of amyloidogenic Aβ peptides. Non-limiting examples of a subject in need thereof include a subject having cells showing an increased level of amyloidogenic Aβ peptide production (APP expression and/or APP maturation) or activity as compared to cells from a normal subject. In an embodiment, the subject in need thereof is a healthy subject (e.g., a subject at risk of developing AD or age-related cognitive decline) a subject already diagnosed with AD or age-related cognitive decline or a subject who has not been diagnosed with AD and who does not have a mutation known to increase the risk of AD. As used herein, a subject at risk of developing AD or age-related cognitive decline, is a subject that has not yet been diagnosed with the disease or condition but which, due to certain factors (age, familial history, heredity) is likely to develop de disease or condition later on in his/her life. In an embodiment, the subject at risk is a subject having a mutation in the APP, PS-1 and/or PS-2 gene(s). In another embodiment, the subject at risk is a subject having a mutation in the APOE-e4 gene. In another embodiment, the subject at risk is a subject having at least one family member (e.g., a mother, father, brother, sister or child) diagnosed with Alzheimer's disease or age-related cognitive decline. In an embodiment, the subject at risk is a subject having a mutation associated with early onset Alzheimer's disease or familial Alzheimer's disease (FAD). In an embodiment, the subject is a mammal, preferably, a human.

[0122] Modifications in genes associated with AD (e.g., APP, PS-1 and PS-2) in accordance with the present disclosure can be used to prevent or treat Alzheimer's disease or age-related cognitive decline. As used herein, the term “prevention/preventing/prevent” means that the modification(s) avoid(s) or delay(s) the onset of the disease. As used herein, the term “treat/treating/treatment” includes instances where the genetic modification(s) reduce(s) partially or completely the progression of the disease and instances where symptoms associated with the disease are reduced partially or completely (i.e., one or more symptoms associated with Aβ peptide neurotoxicity).

[0123] Preferably, the one or more modifications in a targeted gene (e.g., APP) in cells (e.g., neurons) of a subject are introduced as early as possible after the identification of a risk of developing AD or soon after AD diagnosis. In a particular embodiment, the one or more genetic modifications in cells are made after the detection by Magnetic Resonance Imaging (MRI) of plaques comprising extracellular deposits of amyloid β (Aβ) peptides in the subject's brain.

[0124] Methods of introducing one or more genetic modifications in a targeted gene in accordance with the present disclosure preferably involve Base editing (BE) or prime editing (PE). The proposed treatment requires the modification of base pairs in the targeted gene (e.g., APP) using specifically designed Cas nickase fused with a deaminase or a reverse transcriptase, such as the REPAIRv2 deaminase or the ADAR2 deaminase. The introduction of a SSB enable to modify the targeted gene to, for example, reduce the formation of toxic Aβ peptides (e.g., by correcting one or more endogenous mutations in a targeted gene, which are associated with increased risk to develop AD and/or by introducing a protective modification in the targeted gene, which reduces Aβ plaque formation in neurons).

[0125] Although genetic modifications in a targeted gene are preferably introduced by Base or prime editing HR, SSBs in cells, DNA might also be spontaneously repaired by Non-Homologous End Joining (NHEJ) leading to the presence micro-insertions or micro-deletions (INDELs) in the targeted gene. Although these forms of genetic modifications are not preferred they can nevertheless be useful to prevent the formation of the Aβ peptide (e.g., by for example reducing completely or partially the level of APP synthesized in cells or by preventing a cut of the APP protein by the β-secretase.

[0126] Various types of endonucleases or nickases may be fused with a deaminase or reverse transcriptase to induce a site-specific base mutation at selected site(s) in a targeted gene(s) or mRNA(s) (e.g., APP, PS-1, PS-2, etc.). Non-limiting examples of useful endonucleases and nickases include meganucleases, Zinc Finger Nucleases (ZFNs), Transcription Activator-Like Effector nucleases (TALENs), the Cas nucleases, Cas nickases or an inactive Cas nuclease used with a guide RNA in the Clustered regularly interspaced short palindrome repeat (CRISPR) system²⁵⁻²⁷. Each of these technologies can be used to modify a targeted gene in accordance with the present disclosure.

[0127] Preferably, the present disclosure uses the CRISPR system (i.e., combination of guide RNA or pegRNA and Cas nickase fused with a deaminase or a reverse transcriptase, the REPAIRv2 deaminase or the ADAR2 deaminase) to introduce one or more genetic modifications in a targeted gene or mRNA (e.g., APP). Applicants demonstrate herein that specific guide RNAs or pegRNA can be rapidly produced and used with a deaminase or reverse transcriptase to efficiently modify the endogenous APP gene in human cells.

### The Crispr System

[0128] Recent discoveries in the field of bacterial immunity have led to the development of a new system for controlling gene expression in cells. Bacterial and archaea have developed adaptive immune defenses termed clustered regularly interspaced short palindromic repeats (CRISPR) systems, which use crRNAs and Cas proteins to degrade complementary sequences present in invading viral and plasmid DNA²⁸. Jinek et al.²⁹ and Mali et al.²⁸ have engineered a type II bacterial CRISPR system using custom guide RNA to induce a double strand break (DSB) in DNA. This permits to modify a gene targeted by the guide RNA by homology directed repair (HDR), which requires the presence of a donor DNA containing homology sequences that precede and follow the DSB³⁰.

[0129] Subsequently the CRISPR/Cas technology has been improved to permit base editing without inducing a DSB. The first method, called base editing, uses a guide RNA and a Cas9 nickase (cutting only one DNA strand) fused with a cytidine deaminase to chemically modify a cytidine into a thymine³¹. The second base editing method uses a guide RNA and a Cas9 nickase fused with an adenosine deaminase to chemically modify an adenosine into an inosine, the equivalent of a guanine²³. The third method, called PRIME editing, uses an extended guide RNA (called a pegRNA) and a Cas9 nickase fused with a reverse transcriptase (the fusion protein is e.g., PE2) to replace any nucleotide by any other nucleotide²⁴. It is described herein that the Cas9 nickase fused either with a deaminase or reverse transcriptase to efficiently modify a targeted gene (e.g., APP) in cells. Accordingly, a protective modification in the APP gene (i.e., either the A673T, A673V or H684H mutation in Exon 16 of the APP gene) was introduced. This modification has been shown to reduce amyloidogenic Aβ peptide formation in cells.

[0130] Accordingly, in an aspect, methods of the present disclosure involve the design of one or more guide RNAs for inducing a base pair modification in the APP gene or a nucleotide in the mRNA. The guide RNA(s) or pegRNA targeting a region of interest and Cas nickase (e.g., Cas9n) fused with a deaminase or reverse transcriptase, the REPAIRV2 deaminase or ADAR2 deaminase are then used to introduce the desired modification(s) in the endogenous gene within the cell. The present disclosure further relates to uses of such targeted genetic modification(s), such as for reducing amyloidogenic Aβ peptide formation in cells of a subject in need thereof, such as for the treatment of Alzheimer's disease and/or age-related cognitive decline.

[0131] In order to induce a base pair modification in the DNA at a specific site, the Cas9-deaminase or reverse transcriptase protein requires the presence of a guide RNA or pegRNA and a protospacer adjacent motif (PAM) immediately following the nucleotide sequence targeted by the guide RNA³². The PAM is the sequence of nucleotides adjacent to the nucleotide sequence targeted by the guide RNA. Different Cas proteins require a different PAM. Accordingly, selection of a specific polynucleotide target sequence (e.g., on the APP nucleic acid sequence) by a guide RNA is generally based on the recombinant Cas protein used.

[0132] In embodiments, the recombinant Cas protein that may be used in accordance with the present disclosure is i) derived from a naturally occurring Cas; and ii) has a nickase activity to introduce a single strand break (SSB) in cellular DNA when in presence of appropriate guide RNA(s). In another embodiment, the Cas protein is a Cas9 protein having a nickase activity [39]. In accordance with the present disclosure, the Cas protein can be derived from any naturally occurring source. In another embodiment, the adenosine may be modified into an inosine which is biochemically read as guanosine by targeting the gene or the mRNA with a guide RNA and with an adenosine deaminase such as ADAR2 or REPAIRv2.

[0133] For example, Cas9 proteins are natural effector proteins produced by numerous species of bacteria including Streptococcus pyogenes³³, Streptococcus thermophilus³⁴ Campylobacter jejuni³⁵, Staphylococcus aureus³⁶, Streptococcus canis³⁷ and Neisseria meningitides³² Accordingly, in an embodiment, the Cas protein of the present disclosure is a Cas9 nickase derived from the above mentioned bacteria. In an embodiment, the Cas9 recombinant protein of the present disclosure is a human-codon optimized spCas9 derived from the above-mentioned bacteria.

[0134] Although a perfect match between the guide RNA or pegRNA and the DNA sequence on the targeted gene is preferred, a mismatch between a guide RNA or pegRNA and a target base-pair on the gene sequence of interest is also permitted as along as it still allows an hybridization of the guide RNA or pegRNA with the targeted DNA sequence followed by a Cas9 recognition and introduction of a nucleotide modification in the targeted DNA or mRNA. A seed sequence of between 8-12 nucleotides on the guide RNA or pegRNA perfectly complementary to the target sequence (e.g., APP gene or mRNA sequence) is preferred for proper recognition of the target sequence. In general, guide RNA or pegRNA activity is inversely correlated with the number of mismatches. Preferably, the guide RNA or pegRNA of the present disclosure comprises 7 mismatches, 6 mismatches, 5 mismatches, 4 mismatches, 3 mismatches, more preferably 2 mismatches, or less, and even more preferably no mismatch, with the corresponding target gene sequence. Of course, the smaller the number of nucleotides in the guide RNA or pegRNA the smaller the number of mismatches tolerated. The binding affinity is thought to depend on the sum of matching guide RNA-DNA, pegRNA-DNA or guide RNA-mRNA combinations.

[0135] In addition to deaminases fused with Cas9 derived nickases, other deaminases may be used in accordance with the present disclosure to introduce site-specific nucleotide modification into DNA or mRNA. Such deaminase may be fused with Cas9 nickases but may also be fused with meganucleases, Zinc finger nucleases and transcription activator-like effector nucleases (TALENs).

[0136] The Cas nickase recombinant proteins of the present disclosure preferably comprise at least one Nuclear Localization Signal (NLS) to target the protein into the cell nucleus. Accordingly, as used herein the expression “nuclear localization signal” or “NLS” refers to an amino acid sequence, which ‘tags’ a protein for import into the cell nucleus by nuclear transport. Typically, this signal consists of one or more short sequences of positively charged lysines or arginines exposed on the protein surface. Different nuclear localized proteins may share the same NLS. An NLS has the opposite function of a nuclear export signal, which targets proteins out of the nucleus. Classical NLSs can be further classified as either monopartite or bipartite. The first NLS to be discovered was the sequence PKKKRKV (SEQ ID NO: 95) in the SV40 Large T-antigen (a monopartite NLS). The NLS of nucleoplasmin, KR[PAATKKAGQA]KKKK (SEQ ID NO: 96), is the prototype of the ubiquitous bipartite signal: two clusters of basic amino acids, separated by a spacer of about 10 amino acids.

[0137] There are many other types of NLS, which are qualified as “non-classical”, such as the acidic M9 domain of hnRNP A1, the sequence KIPIK in yeast transcription repressor Mata2, the complex signals of U snRNPs as well as a recently identified class of NLSs known as PY-NLSs. Thus, any type of NLS (classical or non-classical) may be used in accordance with the present disclosure as long as it targets the protein of interest into the nucleus of a target cell. In an embodiment, the NLS is derived from the simian virus 40 large T antigen. In an embodiment, the NLS of the recombinant protein of the present disclosure comprises the following amino acid sequence: SPKKKRKVEAS (SEQ ID NO: 97). In an embodiment the NLS comprises the sequence KKKRKV (SEQ ID NO: 98). In an embodiment, the NLS comprises the sequence SPKKKRKVEASPKKKRKV (SEQ ID NO: 99). In another embodiment, the NLS comprises the sequence KKKRK (SEQ ID NO: 100).

[0138] The Cas nickase protein of the present disclosure may optionally advantageously be coupled to a protein transduction domain to ensure entry of the protein into the target cells. Alternatively, the nucleic acid coding for the guide RNA or pegRNA and for the deaminase or reverse transcriptase may be delivered in targeted cells using various viral vectors, virus like particles (VLP) or exosomes.

[0139] Protein transduction domains (PTD) may be of various origins and allow intracellular delivery of a given therapeutic by facilitating the translocation of the protein/polypeptide into a cell membrane, organelle membrane, or vesicle membrane. PTD refers to a polypeptide, polynucleotide, carbohydrate, or organic or inorganic compound that facilitates traversing a lipid bilayer, micelle, cell membrane, organelle membrane, or vesicle membrane. A PTD attached to another molecule facilitates the molecule traversing a membrane, for example going from extracellular space to intracellular space, or cytosol to within an organelle including the mitochondria.

[0140] In an embodiment, a PTD is covalently linked to the amino terminus of a recombinant protein of the present disclosure. In another embodiment, a PTD is covalently linked to the carboxyl terminus of a recombinant protein of the present disclosure. Exemplary protein transduction domains include but are not limited to a minimal undecapeptide protein transduction domain (corresponding to residues 47-57 of HIV-1 TAT comprising YGRKKRRQRRR; a polyarginine sequence comprising a number of arginines sufficient to direct entry into a cell (e.g., 3, 4, 5, 6, 7, 8, 9, 10, or 10-50 arginines); a VP22 domain (49); an Drosophila Antennapedia protein transduction domain (50); a truncated human calcitonin peptide (51); RRQRRTSKLMKR (SEQ ID NO: 101); Transportan GWTLNSAGYLLGKINLKALAALAKKIL (SEQ ID NO: 102); KALAWEAKLAKALAKALAKHLAKALAKALKCEA (SEQ ID NO: 103); and RQIKIWFQNRRMKWKK (SEQ ID NO: 104). Further exemplary PTDs include but are not limited to, KKRRQRRR (SEQ ID NO: 105), RKKRRQRRR (SEQ ID NO: 106); or an arginine homopolymer of from 3 arginine residues to 50 arginine residues.

[0141] Other non-limiting examples of PTD include an endosomal escape peptide. Non-limiting examples of such endosomal escape peptides are listed in the Table 1 below.

TABLE 1
Endosomal escape peptides

| | Primary | | | SEQ |
|---|---|---|---|---|
| | se- | | Refer- | ID |
| Peptide | quence | Mechanism | ences | NO: |
| DT | VGSS | Fusion | (52) | 107 |
| | LSCI | | | |
| | NLDW | | | |
| | DVIR | | | |
| | DKTK | | | |
| | TKIE | | | |
| | SLKE | | | |
| | HGPI | | | |
| | KNKM | | | |
| | SESP | | | |
| | NKTV | | | |
| | SEEK | | | |
| | AKQY | | | |
| | LEEF | | | |
| | HQTA | | | |
| | LEHP | | | |
| | ELSE | | | |
| | LKTV | | | |
| | TGTN | | | |
| | PVFA | | | |
| | GANY | | | |
| | AAWA | | | |
| | VNVA | | | |
| | QVID | | | |
| | SETA | | | |
| | DNLE | | | |
| | KTTA | | | |
| | ALSI | | | |
| | LPGI | | | |
| | GSVM | | | |
| | GIAD | | | |
| | GAVH | | | |
| | HNTE | | | |
| | EIVA | | | |
| | QSIA | | | |
| | LSSL | | | |
| | MVAQ | | | |
| | AIPL | | | |
| | VGEL | | | |
| | VDIG | | | |
| | FAAY | | | |
| | NFVE | | | |
| | SIIN | | | |
| | LFQV | | | |
| | VHNS | | | |
| | YNRP | | | |
| | AYSP | | | |
| | G | | | |
| GALA | WEAA | Membrane | (53) | 108 |
| | LAEA | destabilization, | | |
| | LAEA | pore | | |
| | LAEH | formation | | |
| | LAEA | and | | |
| | LAEA | flip-flop | | |
| | LEAL | of membrane | | |
| | AA | lipids | | |
| PEA | VLAG | Pore formation | (54) | 109 |
| | NPAK | | | |
| | FIDL | | | |
| | DIKP | | | |
| | TVIS | | | |
| | HRLH | | | |
| | FPEG | | | |
| | GSLA | | | |
| | ALTA | | | |
| | HQAC | | | |
| | HLPL | | | |
| | ETFT | | | |
| | RHRQ | | | |
| | PRGW | | | |
| | EQLE | | | |
| | QCGY | | | |
| | PVQR | | | |
| | LVAL | | | |
| | YLAA | | | |
| | RLSW | | | |
| | NQVD | | | |
| | QVIR | | | |
| | NALA | | | |
| | SPGS | | | |
| | GGDL | | | |
| | GEAI | | | |
| | REQP | | | |
| | EQAR | | | |
| | LALT | | | |
| INF-7 | GLFE | Membrane fusion | (55) | 110 |
| | AIEG | and | | |
| | FIEN | destabilization | | |
| | GWEG | | | |
| | MIDG | | | |
| | WYGC | | | |
| LAH4 | KKAL | Membrane | (56) | 111 |
| | LALA | destabilization | | |
| | LHHL | | | |
| | AHLA | | | |
| | LHLA | | | |
| | LALK | | | |
| | KA | | | |
| CM18 | KWKL | Membrane | (57) | 112 |
| | FKKI | destabilization | | |
| | GAVL | | | |
| | KVLT | | | |
| | TG | | | |
| HGP | LLGR | Pore | (58) | 113 |
| | RGWE | formation | | |
| | VLKY | and fusion | | |
| | WWNL | | | |
| | LQ | | | |
| | YWSQ | | | |
| | EL | | | |
| H5WYG | GLFH | Membrane | (59) | 114 |
| | AIAH | destabilization | | |
| | FIHG | | | |
| | GWHG | | | |
| | LIHG | | | |
| | WYG | | | |
| HA2 | GLFG | Membrane | (60) | 115 |
| | AIAG | Fusion | | |
| | FIEN | and | | |
| | GWEG | destabilization | | |
| | MIDG | | | |
| | WYG | | | |
| EB1 | LIRL | Membrane | (61) | 116 |
| | WSHL | destabilization | | |
| | IHIW | | | |
| | FQNR | | | |
| | RLK | | | |
| | WKKK | | | |
| DT | VGSS | Fusion | (52) | 117 |
| | LSCI | | | |
| | NLDW | | | |
| | DVIR | | | |
| | DKTK | | | |
| | TKIE | | | |
| | SLKE | | | |
| | HGPI | | | |
| | KNKM | | | |
| | SESP | | | |
| | NKTV | | | |
| | SEEK | | | |
| | AKQY | | | |
| | LEEF | | | |
| | HQTA | | | |
| | LEHP | | | |
| | ELSE | | | |
| | LKTV | | | |
| | TGTN | | | |
| | PVFA | | | |
| | GANY | | | |
| | AAWA | | | |
| | VNVA | | | |
| | QVID | | | |
| | SETA | | | |
| | DNLE | | | |
| | KTTA | | | |
| | ALSI | | | |
| | LPGI | | | |
| | GSVM | | | |
| | GIAD | | | |
| | GAVH | | | |
| | HNTE | | | |
| | EIVA | | | |
| | QSIA | | | |
| | LSSL | | | |
| | MVAQ | | | |
| | AIPL | | | |
| | VGEL | | | |
| | VDIG | | | |
| | FAAY | | | |
| | NFVE | | | |
| | SIIN | | | |
| | LFQV | | | |
| | VHNS | | | |
| | YNRP | | | |
| | AYSP | | | |
| | G | | | |

[0142] In an embodiment, the protein transduction domain is TAT or Pep-1. In an embodiment, the protein transduction domain is TAT and comprises the sequence SGYGRKKRRQRRRC (SEQ ID NO: 118). In another embodiment, the protein transduction domain is TAT and comprises the sequence YGRKKRRQRRR (SEQ ID NO: 119). In another embodiment, the protein transduction domain is TAT and comprises the sequence KKRRQRRR (SEQ ID NO: 105). In another embodiment, the protein transduction domain is Pep-1 and comprises the sequence KETWWETWWTEWSQPKKKRKV (SEQ ID NO: 120).

[0143] In addition, or alternatively to the above-mentioned protein transduction domains, the nickase (e.g., Cas9 nickase) recombinant protein or nucleic acid and guide RNA(s) of the present disclosure may be coupled to liposomes to further facilitate their delivery into the cells.

[0144] Genetic constructs encoding a deaminase in accordance with the present disclosure can be made using either conventional gene synthesis or modular assembly.

[0145] In an aspect, the guide RNAs or pegRNA and recombinant Cas nickase fusion proteins of the present disclosure may be used to decrease toxic amyloidogenic Aβ peptides production. In another aspect, the guide RNAs or pegRNA and deaminase or reverse transcriptase recombinant protein of the present disclosure may be used to decrease APP cleavage at the beta secretase site (e.g., between amino acid 671 and 672 of APP) thereby inhibiting completely or partially the production of amyloidogenic Aβ peptides. As used herein, the expression “decreasing” in “decreasing the expression of amyloidogenic Aβ peptides in a cell” is meant to include circumstances where, in the absence of a guide RNA and of a deaminase protein of the present disclosure, the amyloidogenic Aβ peptides are expressed at certain amount (baseline amount), which is decreased in their presence. It comprises decreasing/reducing/inhibiting the maturation (cleavage) into amyloidogenic Aβ peptides in cells completely or partially. The cell may be a cell expressing a normal level of APP or amyloidogenic Aβ peptides or an abnormal/higher level of amyloidogenic Aβ peptides (as compared to normal conditions).

[0146] In an embodiment, the guide RNA or pegRNA and the deaminase or reverse transcriptase of the present disclosure may be used to decrease the production of amyloidogenic Aβ peptides.

[0147] In an embodiment, the present disclosure relates to a method of decreasing amyloidogenic Aβ peptide expression, production or accumulation in a subject in need thereof comprising administering to the subject an effective amount of a guide RNA, a recombinant deaminase or reverse transcriptase protein of the present disclosure in order to introduce one or more genetic modifications in a target gene (e.g., APP, PS-1 or PS-2). In an embodiment, the recombinant deaminase or reverse transcriptase protein and guide RNA or pegRNA are specifically formulated for crossing the plasma membrane and reaching the nucleus. In an embodiment, the present disclosure provides a composition comprising a recombinant deaminase or reverse transcriptase protein and a guide RNA or pegRNA of the present disclosure together with a pharmaceutically acceptable carrier. In an embodiment, the method of the present disclosure corrects a mutation present in a target gene, which is associated with increased risk of developing Alzheimer's disease. In an embodiment, the mutation increases the expression or maturation of APP into toxic Aβ peptides. In another embodiment, the method of the present disclosure introduces a modification in a target gene or mRNA, which protects against Alzheimer's disease (i.e., reduces the risk of developing Alzheimer's disease). In an embodiment, the modification decreases the production of amyloidogenic Aβ peptides by modifying one or more of the beta and gamma secretases cleavage sites in the APP protein, thereby reducing amyloidogenic Aβ peptide secretion. In an embodiment the modification is a modification at amino acid 673 or 684 or other amino acids close to that position of the APP protein, which reduces cutting by the beta-secretase. In an embodiment, the modification replaces an alanine at position 673 with a threonine or a valine. In another embodiment, the modification replaces a histidine at position 684 with an arginine.

### Optimization of Codon Degeneracy

[0148] Because several site-specific nuclease proteins, such as Cas9, are normally expressed in bacteria, it may be advantageous to modify their nucleic acid sequences for optimal expression in eukaryotic cells (e.g., mammalian cells). This has been done for the embodiment of the Cas9 nuclease and the deaminase proteins of the present disclosure described herein.

[0149] Codon degeneracy may also be used to distinguish two nucleic acids encoding for the same protein. For example, the donor/patch nucleic acid sequence of the present disclosure may comprise one or more modifications with respect to the wild type targeted gene sequence, which do not translate into modifications at the amino acid level.

[0150] Accordingly, the following codon chart (Table 2) may be used, in a site-directed mutagenic scheme, to produce nucleic acids encoding the same or slightly different amino acid sequences of a given nucleic acid:

TABLE 2
Codons encoding the same amino acid

| Amino Acids | | | | | | | Codons | | | |
|---|---|---|---|---|---|---|---|---|---|---|
| Alanine Cysteine | Ala | Cys | A | C | GCA | GCC | GCG | GCU | | |
| Aspartic acid | Asp | | D | | UGC | UGU | | | | |
| | | | | | GAC | GAU | | | | |
| Glutamic acid | Glu | | E | | GAA | GAG | | | | |
| Phenylalanine | Phe | | F | | UUC | UUU | | | | |
| Glycine | Gly | | G | | GGA | GGC | GGG | GGU | | |
| Histidine | His | | H | | CAC | CAU | | | | |
| Isoleucine | Ile | | I | | AUA | AUC | AUU | | | |
| Lysine | Lys | | K | | AAA | AAG | | | | |
| Leucine | Leu | | L | | UUA | UUG | CUA | CUC | CUG | CUU |
| Methionine | Met | | M | | AUG | | | | | |
| Asparagine | Asn | | N | | AAC | AAU | | | | |
| Proline | Pro | | P | | CCA | CCC | CCG | CCU | | |
| Glutamine | Gln | | Q | | CAA | CAG | | | | |
| Arginine | Arg | | R | | AGA | AGG | CGA | CGC | CGG | CGU |
| Serine | Ser | | S | | AGC | AGU | UCA | UCC | UCG | UCU |
| Threonine | Thr | | T | | ACA | ACC | ACG | ACU | | |
| Valine | Val | | V | | GUA | GUC | GUG | GUU | | |
| Tryptophan | Trp | | W | | UGG | | | | | |
| Tyrosine | Tyr | | Y | | UAC | UAU | | | | |

### Sequence Similarity

[0151] “Homology” and “homologous” refers to sequence similarity between two peptides or two nucleic acid molecules. Homology can be determined by comparing each position in the aligned sequences. A degree of homology between nucleic acid or between amino acid sequences is a function of the number of identical or matching nucleotides or amino acids at positions shared by the sequences. As the term is used herein, a nucleic acid sequence is “homologous” to another sequence if the two sequences are substantially identical and the functional activity of the sequences is conserved (as used herein, the term “homologous” does not infer evolutionary relatedness, but rather refers to substantial sequence identity). Two nucleic acid sequences are considered substantially identical if, when optimally aligned (with gaps permitted), they share at least about 50% sequence similarity or identity, or if the sequences share defined functional motifs. In alternative embodiments, sequence similarity in optimally aligned substantially identical sequences may be at least 60%, 70%, 75%, 80%, 85%, 90% or 95%. For the sake of brevity, the units (e.g., 66, 67 . . . 81, 82 . . . 91, 92% . . . ) have not systematically been recited but are considered, nevertheless, within the scope of the present disclosure.

[0152] Substantially complementary nucleic acids are nucleic acids in which the complement of one molecule is substantially identical to the other molecule. Two nucleic acid or protein sequences are considered substantially identical if, when optimally aligned, they share at least about 70% sequence identity. In alternative embodiments, sequence identity may for example be at least 75%, at least 80%, at least 85%, at least 90%, at least 95%, at least 96%, at least 98% or at least 99%. Optimal alignment of sequences for comparisons of identity may be conducted using a variety of algorithms, such as the local homology algorithm of Smith and Waterman³⁸, the homology alignment algorithm of Needleman and Wunsch³⁹, the search for similarity method of Pearson and Lipman⁴⁰, and the computerized implementations of these algorithms (such as GAP, BESTFIT, FASTA and TFASTA in the Wisconsin Genetics Software Package, Genetics Computer Group, Madison, Wis., U.S.A.). Sequence identity may also be determined using the BLAST algorithm, described in Altschul et al.⁴¹ (using the published default settings). Software for performing BLAST analysis may be available through the National Center for Biotechnology Information (through the internet at http://www.ncbi.nlm.nih.gov/). The BLAST algorithm involves first identifying high scoring sequence pairs (HSPs) by identifying short words of length W in the query sequence that either match or satisfy some positive-valued threshold score T when aligned with a word of the same length in a database sequence. T is referred to as the neighborhood word score threshold. Initial neighborhood word hits act as seeds for initiating searches to find longer HSPs. The word hits are extended in both directions along each sequence for as far as the cumulative alignment score can be increased. Extension of the word hits in each direction is halted when the following parameters are met: the cumulative alignment score falls off by the quantity X from its maximum achieved value; the cumulative score goes to zero or below, due to the accumulation of one or more negative-scoring residue alignments; or the end of either sequence is reached. The BLAST algorithm parameters W, T and X determine the sensitivity and speed of the alignment. One measure of the statistical similarity between two sequences using the BLAST algorithm is the smallest sum probability (P(N)), which provides an indication of the probability by which a match between two nucleotide or amino acid sequences would occur by chance. In alternative embodiments of the invention, nucleotide or amino acid sequences are considered substantially identical if the smallest sum probability in a comparison of the test sequences is less than about 1, preferably less than about 0.1, more preferably less than about 0.01, and most preferably less than about 0.001.

[0153] An alternative indication that two nucleic acid sequences are substantially complementary is that the two sequences hybridize to each other under moderately stringent, or preferably stringent, conditions. Hybridization to filter-bound sequences under moderately stringent conditions may, for example, be performed in 0.5 M NaHPO4, 7% sodium dodecyl sulfate (SDS), 1 mM EDTA at 65° C., and washing in 0.2×SSC/0.1% SDS at 42° C. (64). Alternatively, hybridization to filter-bound sequences under stringent conditions may, for example, be performed in 0.5 M NaHPO4, 7% SDS, 1 mM EDTA at 65° C., and washing in 0.1×SSC/0.1% SDS at 68° C. (64). Hybridization conditions may be modified in accordance with known methods depending on the sequence of interest. Generally, stringent conditions are selected to be about 5° C. lower than the thermal melting point for the specific sequence at a defined ionic strength and pH.

[0154] In another aspect, the invention further provides one or more nucleic acids encoding the above-mentioned Cas or deaminase recombinant protein and guide RNA sequences. The invention also provides a vector comprising one or more of the above-mentioned nucleic acids. In an embodiment, the vector further comprises a transcriptional regulatory element operably linked to the above-mentioned nucleic acid. A first nucleic acid sequence is “operably-linked” with a second nucleic acid sequence when the first nucleic acid sequence is placed in a functional relationship with the second nucleic acid sequence. For instance, a promoter is operably linked to a coding sequence if the promoter affects the transcription or expression of the coding sequences. Generally, “operably-linked” DNA sequences are contiguous and, where necessary to join two protein coding regions, in reading frame. However, since, for example, enhancers generally function when separated from the promoters by several kilobases and intronic sequences may be of variable lengths, some polynucleotide elements may be operably-linked but not contiguous. “Transcriptional regulatory element” is a generic term that refers to DNA sequences, such as initiation and termination signals, enhancers, and promoters, splicing signals, polyadenylation signals, which induce or control transcription of protein coding sequences with which they are operably-linked.

[0155] As indicated above, guide RNAs or pegRNA and Cas or deaminase or reverse transcriptase recombinant nucleic acids of the present disclosure may be delivered into cells using various viral vectors. Accordingly, preferably, the above-mentioned vector is a viral vector for introducing the guide RNA or pegRNA and/or Cas and/or deaminase or reverse transcriptase nucleic acid encoding the Cas9, the deaminase or reverse transcriptase sequence of the present disclosure in a target cell (preferably a neuron). Non-limiting examples of viral vectors include retrovirus, lentivirus, Herpes virus, adenovirus or adeno Associated Virus, as well known in the art. Herpes virus, adenovirus, Adeno-Associated virus and lentivirus derived viral vectors have been shown to efficiently infect neuronal cells. Preferably, the viral vector is episcopal and not cytotoxic to cells. In an embodiment, the viral vector is an AAV or a Herpes virus. The Cas9 nickase, the deaminase or reverse transcriptase genes or the Cas9 nickase and/or the deaminase or reverse transcriptase protein may also be delivered to the cells by virus like particles (VLP), exosomes or other extra-cellular vesicles such as exosomes.

[0156] In yet another aspect, the present disclosure provides a cell (e.g., a host cell, a recombinant cell) comprising the modified targeted gene or mRNA. The invention further provides a recombinant expression system, vectors and host cells, such as those described above, for the expression/production of a recombinant protein, using for example culture media, production, isolation and purification methods well known in the art.

[0157] In another aspect, the present disclosure provides a composition (e.g., a pharmaceutical composition) comprising the above-mentioned guide RNA or pegRNA and a recombinant nickase (e.g., Cas9) fused with a deaminase or reverse transcriptase nucleic acid or protein. In an embodiment, the composition comprises the above-mentioned viral vectors, virus like particles (VLP), exosomes or other extra-cellular vesicles for targeting the guide RNA, nickase (e.g., Cas9n), the REPAIRv2 deaminase or the ADAR2 deaminase into a cell. In an embodiment, the cell is a neuronal cell. In an embodiment, the composition further comprises one or more pharmaceutically acceptable carriers, excipients, and/or diluents.

[0158] As used herein, “pharmaceutically acceptable” (or “biologically acceptable”) refers to materials characterized by the absence of (or limited) toxic or adverse biological effects in vivo. It refers to those compounds, compositions, and/or dosage forms, which are, within the scope of sound medical judgment, suitable for use in contact with the biological fluids and/or tissues and/or organs of a subject (e.g., human, animal) without excessive toxicity, irritation, allergic response, or other problem or complication, commensurate with a reasonable benefit/risk ratio.

[0159] The present disclosure further provides a kit or package comprising the above-mentioned guide RNA or pegRNA and recombinant nickase and/or deaminase or reverse transcriptase protein or composition, together with instructions for reducing amyloidogenic Aβ peptide production levels (expression or maturation) in a cell or for the treatment of Alzheimer's disease or age-related cognitive decline.

[0160] The present disclosure is illustrated in further details by the following non-limiting examples.

### EXAMPLES

### Example 1: Effect of A673 Mutation on Aβ Peptide Formation in APP Containing FAD Mutation(s)

[0161] Our first experiment aimed to verify whether the Icelandic mutation (A673T) reduced the formation of Aβ40 and Aβ42 peptides when a FAD mutation was also present in the APP gene. This was tested by constructing various plasmids containing the APP gene with one to three FAD mutations with or without an additional Icelandic mutation. These plasmids were then transfected in 293T cells or in SH-SY5Y cells and the concentration of Aβ40 and Aβ42 peptides was measured in the culture medium 3 days later.

[0162] The plasmid used as a backbone was pcDNA6N5-His from Invitrogen Inc. A cDNA APP695 was inserted by ligation between the Kpn1 and the Xba1 cutting sites. This plasmid was then mutated with New England Biology Inc. (NEB) mutagenesis Q5 kit in order to create a single point mutation responsible of a Familial Form of Alzheimer disease (FAD). Several mutations in APP exons 16 and 17 known to induce a FAD by increasing the Alzheimer pathogenicity were created: KM670/671NL⁴², A673V⁴³, H677R⁴⁴, D678H (Chen et al., 2012), D678N⁴⁵, E682K⁴⁶, A692G⁴⁷, E693del⁴⁸, E693G⁴⁹, D694N⁵⁰, A713T⁵¹, T714A⁵², T714I⁵³, V715A⁵⁴, V715M⁵⁵, I716F⁵⁶, I716M⁵⁷, I716T⁵⁸, I716V⁵⁹, V717F⁶⁰, V717G⁶¹, V717I⁶², V717L⁶³, T719P⁶⁴, M722K⁶⁵, L723P⁶⁶, K724N⁶⁷.

[0163] Plasmids containing 2 or 3 FAD mutations were also created because several mouse models of AD contained these combinations of mutations.

[0164] In order to determine the protective effect of the Icelandic mutation A673T, another set of APP cDNA plasmids was also made containing not only one or several FAD mutations but also an in additional Icelandic mutation (A673T).

Transfection in SH-SY5Y or in 293T Cells of Plasmids Coding for the APP695 cDNA Containing One or Several FAD Mutations and Containing or not the Icelandic Mutation.

[0165] The transfection reagent (Lipofectamine2000™) and Opti-MEM-1™ culture media) were purchased from Life Technologies Inc.

[0166] The day before the transfection, 100,000 293T or SH-SY5Y cells were seeded per well in a 24 well plates in DMEM (DMEM F12 for SH-SY5Y cells) medium supplemented with 10% FBS and antibiotics (penicillin/streptomycin 1×). The following morning, the culture medium was changed for 500 μl of DMEM medium (DMEM F12 for SH-SY5Y cells) supplemented with 10% FBS without antibiotics. The plate was incubated at 37° C. in the incubator for the time required to prepare the transfection solution. For the transfection, solutions A and B were first prepared. Solution A contained 48 μl of Opti-MEM™ and 2 μl of Lipofectamine™ 2000 for a final volume of 50 μl. Solution B was prepared as follows: a volume of DNA solution containing 150 ng to 800 ng of DNA was mixed with a volume of Opti-MEM™ to obtain a final volume of 50 μl. For each co-transfection, various amounts of the plasmids were used. Solutions A and B were then mixed by up and down movement and incubated at room temperature for 20 minutes. 100 μl of the mixed solution were then added to each well. The plate was let in the CO₂ incubator for a period of 4 to 6 hours. The medium was changed by 1 ml of DMEM (DMEM F12 for SH-SY5Y cells) supplemented with 10% FBS and antibiotics. The plate was incubated for 72 hours in the CO₂ incubator before extraction of genomic DNA. The supernatants were harvested, a protease inhibitor (1 mM PMSF, phenylmethane sulfonyl fluoride or phenylmethylsulfonyl fluoride) was added and this was stored at −80° C.

[0167] The concentrations of Aβ40 and Aβ42 peptides were measured with Meso Scale Discovery Inc. (MSD) Neurodegenerative Disease Assay kit (using the 6E10 antibody for preliminary immuno-precipitation). The experiment results (Table 3) showed that the Aβ40 and Aβ42 peptide concentrations in the supernatants were decreased for a majority of the cells transfected with a plasmid coding for the APP cDNA containing not only one or several FAD mutations but also the Icelandic mutation (A673T), compared to cells transfected either with the wild type APP cDNA or a APP cDNA containing only one or several FAD mutations. Thus, the A673T mutation reduces the formation of Aβ peptides even in the presence of a FAD mutation and thus should prevent or slow-down the progression of Alzheimer disease in patients with a FAD mutation. The significance was determined by a Sidak's ANOVA test. P value style *p<0.0332, **p<0.0021, ***p<0.0002, ****p<0.0001.

TABLE 3

| | Aβ42% | | | Aβ40% | | |
|---|---|---|---|---|---|---|
| EOAD mutation | Decrease | S.D. | Sign. | Decrease | S.D. | Sign. |
| V717I (London) | −63 | 1.8 | **** | −80 | 11.8 | **** |
| V717G | −55 | 0.6 | **** | −24 | 1.8 | ns |
| D694N (Iowa) | −47 | 5.3 | ns | −56 | 5.7 | ns |
| Wild-type | −45 | 6.5 | * | −65 | 13.7 | * |
| T714I (Austrian) | −42 | 1.7 | **** | −33 | 0.2 | ns |
| A692G (Flemish) | −41 | 7.8 | ns | −40 | 7.0 | **** |
| V715A (German) | −40 | 2.5 | **** | −36 | 3.4 | * |
| M722K | −38 | 4.2 | *** | −31 | 0.2 | ns |
| V715M (French) | −36 | 3.2 | **** | −26 | 6.2 | ns |
| V717L | −36 | 11.4 | ns | −40 | 9.1 | ns |
| I716F (Iberian) | −35 | 15.3 | ns | −51 | 27.2 | ns |
| K687N | −32 | 3.8 | ns | −28 | 7.7 | ns |
| T719P | −30 | 1.5 | *** | −9 | 11.1 | ns |
| E682K (Leuven) | −30 | 6.3 | **** | −31 | 2.4 | **** |
| E693del (Osaka) | −28 | 3.7 | ns | −44 | 6.7 | ns |
| V717F | −28 | 1.3 | * | −16 | 0.5 | ns |
| I716M | −23 | 2.7 | ** | −29 | 3.9 | ** |
| NL/F/G | −20 | 12.9 | ns | −64 | 33.1 | ns |
| T714A (Iranian) | −19 | 4.8 | ns | −10 | 4.8 | ns |
| A713T | −18 | 0.5 | ns | −26 | 0.6 | ns |
| E693K (Italian) | −18 | 0.2 | ns | −32 | 6.2 | ns |
| I716V (Florida) | −17 | 4.9 | ns | −19 | 1.9 | ns |
| KM670/671NL | −10 | 7.9 | ns | −1 | 10.4 | ns |
| (Swedish) | | | | | | |
| K724N (Belgian) | −5 | 0.2 | ns | 3 | 0.7 | ns |
| D678N (Tottori) | −3 | 4.0 | ns | −13 | 11.7 | −13 |
| E693Q (Dutch) | −2 | 4.4 | ns | −4 | 1.0 | ns |
| E693G (Arctic) | 10 | 46.8 | ns | 20 | 41.8 | ns |
| L723P (Australian) | 15 | 5.8 | ns | 6 | 1.8 | ns |
| D678H (Taiwanese) | 21 | 20.3 | ns | 22 | 38.8 | ns |
| I716T | 44 | 0.3 | ** | 116 | 0.2 | ns |
| H677R (English) | 102 | 5.0 | ** | 110 | 21.5 | * |
| NL/F | 139 | 14.3 | ns | 64 | 14.8 | * |

S.D.: Standard deviation
ns: no signal

### Example 2: Introduction of A673T Mutation Via Base Editing Using the CRISPRICas9 System

[0168] The second experiment aimed to introduce the Icelandic mutation (A673T) in the APP gene by using a site-specific cytidine deaminase fused with a Cas nickase (Cas9n). The alanine codon in position 673 is 5′GCA3′, the antisense codon is thus 5′TGC3′. We aimed to modify the cytidine in the antisense codon into a thymidine thus producing the antisense codon 5′TGT3′. The sense codon will thus be 5′ACA3′ which codes for threonine. For this experiment, 293T or SH-SY5Y cells were co-transfected with a plasmid coding for a Cas9n/Cytidine deaminase and the pBSU6 plasmid coding for a guide RNA targeting a specific sequence of the APP gene.

[0169] The site-specific cytidine deaminases are fusion enzymes, which include a mutated Cas9 nuclease (D10A) to generate a Cas9 nickase (Cas9n). This Cas9n may be fused with various deaminases (either the APOBEC1 or the Activation-induced cytidine deaminase (Target-AID or CDA1) and various spacer lengths (FIG. 4). The resulting hybrid enzymes designated as BE3, BE4 and Target-AID. For our experiments, we have also generated genes coding for several new hybrid Cas9 deaminases including not only the Cas9 nickase from Streptococcus pyogenes, but also the Cas9 nickase from Staphylococcus aureus and a variant of the SaCas9 nickase named KKH SaCas9, which reacts with NNNRRT PAMs⁶⁸.

[0170] Modifications of the SpCas9 nuclease (designated under the names VQR and EQR) have previously been produced to detect various PAMs⁶⁹. The VQR variant robustly reacting with NGAN PAMs and the EQR variant being more specific for an NGAG PAM. Various Cas9 cytidine deaminases have also been previously described^{31,70}. A variant of SaCas9 called SaCas9-KKH has also been produced^{68, 71}. We have thus also produced additional hybrid enzymes including these SpCas9 and SaCas9 variants. The list of the deaminases that we have produced and tested is the following: BE3_SpCas9n_{VQR}, BE3_SpCas9n_{EQR}, BE3_SaCas9n_{KKH}, YE1-BE3, YE1-BE3_SpCas9n_{VQR}, YE1-BE3_SpCas9n_{EQR}, YE1-BE3_SaCas9n_{KKH}, BE4-Gam_SpCas9n_{VQR}, BE4-Gam_SpCas9n_{EQR}, Target-AID SpCas9n_{VQR}, Target-AID SpCas9n_{EQR}, Target-AID SaCas9n_{KKH}, hADAR2, REPAIRv2, ABE6.3, ABE7.8, ABE7.9, ABE7.10. Two spacer lengths, either 17 bp to 22 bp, were tested in order to influence the conversion window. One or two guide RNAs were inserted in a modified pBSU6 plasmid.

[0171] 1) BE3_SpCas9n_{VQR} (SEQ ID NOs: 3 and 4) is a variant of BE3, which contains a SpCas9n protein with 3 mutated amino acids D1135V/R1335Q/T1337R. This SpCas9n_{VQR} enzyme was produced by Kleinstiver et al.⁶⁹. The gene for this enzyme was available at Addgene Inc. as pBK-VQR-BE3 (#85171).

[0172] 2) BE3_SpCas9n_{EQR} (SEQ ID NOs: 5 and 6) is a variant of BE3, which contains a SpCas9n protein with 3 mutated amino acids D1135E/R1335Q/T1337R. This SpCas9n_{EQR} enzyme was done by Kleinstiver et al⁶⁹. The gene for this enzyme was available at Addgene Inc. as pBK-EQR-BE3 (#85172).

[0173] 3) BE3_SaCas9n_{KKH} (SEQ ID NOs: 7 and 8) is a variant of BE3, which contains a SaCas9n protein (from Staphylococcus aureus) with 3 mutated amino acids E782K/N968K/R1015H. This mutated SaCas9n_{KKH} enzyme was done by Kleinstiver et al⁶⁸. The gene for this enzyme was available at Addgene Inc as pJL-SaKKH-BE3 (#85170).

[0174] 4) YE1-BE3 (SEQ ID NOs: 9 and 10) is a construct variant of BE3, which contain 2 mutated amino acid (W90Y/R126E) in the rAPOBEC1 sequences. The gene for this enzyme was available at Addgene Inc. as pBK-YE1-BE3 (#85174). We used this plasmid to construct all other variants containing the YE1 rAPOBEC1 deaminase.

[0175] 5) YE1-BE3_SpCas9n_{VQR} (SEQ ID NOs: 11 and 12) is a variant of the YE1-BE3 that was made in our laboratory. rAPOBEC1 version in plasmid pBK-VQR-BE3 was replaced by the YE1 version from plasmid YE1-BE3.

[0176] 6) YE1-BE3_SpCas9n_{EQR} (SEQ ID NOs: 13 and 14) is a variant of the YE1-BE3 that was made in our laboratory. rAPOBEC1 version in plasmid pBK-EQR-BE3 was replaced by the YE1 version from plasmid YE1-BE3.

[0177] 7) YE1-BE3_SaCas9n_{KKH} (SEQ ID NOs: 15 and 16) is a variant of the BE3_SaCas9n_{KKH} that was made in our laboratory. rAPOBEC1 version in plasmid BE3_SaCas9n_{KKH} was replaced by the YE1 version from plasmid YE1-BE3.

[0178] 8) BE4-Gam_SpCas9n_{VQR} (SEQ ID NOs: 17 and 18) is a variant of the BE4-Gam available at Addgene Inc. #100806 that was made in our laboratory by PCR mutagenesis to create VQR mutation in the SpCas9n gene.

[0179] 9) BE4-Gam_SpCas9n_{EQR} (SEQ ID NOs: 19 and 20) is a variant of the BE4-Gam available at Addgene Inc #100806. This variant was made in our laboratory by PCR mutagenesis to create EQR mutation in the SpCas9n gene.

[0180] 10) Target-AID SpCas9n_{VQR} (SEQ ID NOs: 21 and 22) is a variant of the Target-AID enzyme described by Komor et al.¹⁰. As shown in FIG. 1, the original Target-AID enzyme contains the SpCas9n(D10A), a 105 amino acids linker, CDA1 (i.e., the activation induced cytidine deaminase (AID) that was modified by Nishida et al.⁷⁰), a 11 amino acids linker and the UGI. The original plasmid, named nCas9-PmCDA1-UGI available at Addgene Inc. #76620 was modified by PCR mutagenesis to create the VQR version of the SpCas9n.

[0181] 11) Target-AID SpCas9n_{EQR}(SEQ ID NOs: 23 and 24) is a variant of the Target-AID enzyme described by Komor et al.¹⁰. The original Target-AID enzyme contains the SpCas9n(D10A), a 105 amino acids linker, CDA1 (i.e., the activation induced cytidine deaminase (AID) that was modified by Nishida et al.⁷⁰), a 11 amino acids linker and the UGI. The original plasmid, named nCas9-PmCDA1-UGI and guide RNA(HPRT)(Target-AID) available at Addgene Inc. #76620 was modified by PCR mutagenesis to create the EQR version of the SpCas9n.

[0182] 12) Target-AID SaCas9n_{KKH} (SEQ ID NOs: 25 and 26) is a variant of the original plasmid called Target-AID available at Addgene Inc. #76620. The SpCas9n was replaced by SaCas9n_{KKH}. Briefly, the SpCas9n was removed by cutting the plasmid with two restriction enzymes. The SpCas9n of the #76620 plasmid was replaced by the SaCas9n_{KKH}.

[0183] 13) hADAR2 (SEQ ID NOs: 27 and 28) is a member of the adenosine deaminase acting on RNA (ADAR) family of enzymes, which mediates endogenous editing of transcripts via hydrolytic deamination of adenosine to inosine, a nucleobase that is functionally equivalent to guanosine in translation and splicing. There are two functional human ADAR orthologs, ADAR1 and ADAR2, which consist of N-terminal double stranded RNA-binding domains and a C-terminal catalytic deamination domain.

[0184] 14) REPAIRv2 (SEQ ID NOs: 29 and 30) is was produced by Cox et al.¹⁶ using rational mutagenesis scheme to improve the specificity of dCas13b-ADAR2DD fusions to generate an enzyme with more than 919-fold higher specificity. Addgene plasmid #pC0055).

[0185] 15) ABE6.3 (SEQ ID NOs: 31 and 32), ABE7.8 (SEQ ID NOs: 33 and 34), ABE7.9 (SEQ ID NOs: 35 and 36), ABE7.10 (SEQ ID NOs: 37 and 38) are various DNA adenosine deaminase enzymes that were produced by Gaudelli et al.²³ by mutagenesis of a transfer RNA adenosine deaminase. The coding plasmids were obtained from AddGene inc. (respectively #102916, #102917, #102918 and #102919).

Various SpCas9 VQR/EQR guide RNAs targeting
sequences of 17 to 22 nucleotides were tested:
(SEQ ID NO: 53)
ATTCTGCATCCATCTTCACTTCAGAG
(SEQ ID NO: 54)
TTCTGCATCCATCTTCACTTCAGAG
(SEQ ID NO: 55)
TCTGCATCCATCTTCACTTCAGAG
(SEQ ID NO: 56)
CTGCATCCATCTTCACTTCAGAG
(SEQ ID NO: 57)
TGCATCCATCTTCACTTCAGAG
(SEQ ID NO: 58)
GCATCCATCTTCACTTCAGAG
Various SaCas9 guide RNAs were tested:
(SEQ ID NO: 59)
ATTCTGCATCCATCTTCACTTCAGAGAT
(SEQ ID NO: 60)
TTCTGCATCCATCTTCACTTCAGAGAT
(SEQ ID NO: 61)
TCTGCATCCATCTTCACTTCAGAGAT
(SEQ ID NO: 62)
CTGCATCCATCTTCACTTCAGAGAT
(SEQ ID NO: 63)
TGCATCCATCTTCACTTCAGAGAT
(SEQ ID NO: 64)
GCATCCATCTTCACTTCAGAGAT

### Deamination Results

[0186] FIG. 5 upper section illustrates DNA sequence of a wild-type APP exon 16 sense strand and antisense strand APP. The lower section of the figure illustrates the fully deaminated (C to T conversion) of the 5 cytidines (C1 to C5) located within the conversion window of the cytidine deaminase APOBEC1 and AID. The deamination of the cytidine C1 in the antisense strand modifies the glutamic acid codon (GAA) in position 674 into a lysine codon (MA). The deamination of the cytidine C2 in the antisense strand changes the alanine codon (GCA) in position 673 into a threonine codon (ACA), thus inducing the Icelandic A673T mutation. The deamination of C3 in the antisense strand changes the aspartic acid codon (GAT) in position 672 into an asparagine codon (AAT). The deamination of the C4 nucleotide changes the methionine codon (ATG) in position 671 into an isoleucine codon (ATA). The deamination of the C5 nucleotide is a silent mutation that does not modify the resulting amino acid (lysine) in position 670.

[0187] The objective of the proposed Alzheimer treatment is to deaminate the highest percentage of C2 and the lowest percentages of the other four C to generate the A673 Icelandic mutation.

### Experiment Description

[0188] 100,000 293T cells or SH-SY5Y cells were deposited in each well of a 24 wells plate. These cells were transfected with a plasmid coding for one Cas9-deaminase and one guide RNA. The cells were incubated at 37° C. Cells were detached 72 hours later by performing up and down movements in 1 ml culture medium with a pipette. These cells were transferred in an Eppendorf tube and centrifuge at 8000 RPM for 10 minutes. The supernatant medium was carefully removed without disturbing the cell pellets. These cell pellets were washed once with 1 ml of HBSS solution and centrifuged at 8000 RPM for 10 minutes. The HBSS was then carefully removed without disturbing the cell pellets. The cells were lysed with 100 μl of lysis buffer containing 1% Sarkosyl and 0.5M EDTA pH8 supplement with 10 μl of proteinase K solution (20 mg/ml). These tubes were incubated at 56° C. for 15 minutes. 400 μl of 50 mM Tris pH8 were then added to each tube. Next, 500 μl of a mixture of phenol:chloroform:isoamyl alcohol (respectively 25:24:1) was added. The tubes were centrifuged at 16 000 RPM for 2 minutes. The aqueous upper phase was transferred to a new tube. 50 μl of 5 M NaCl was added to each tube and mixed thoroughly. One (1) ml of ice-cold ethanol 100% was added to each tube and mixed for genomic DNA precipitation. The tubes were centrifuged at 16000 RPM for 7 minutes and ethanol was carefully removed to avoid disturbing the DNA pellets. These DNA pellets were washed once with 400 μl ethanol 70%. The tubes were centrifuged at 16000 RPM for 5 minutes and ethanol was removed to permit to dry the DNA pellet rapidly by lyophilization. The DNA was solubilized in 50-100 μl of sterile water and stored at −20° C. until quantification was performed. The DNA solutions were dosed at 260 nm with a spectrophotometer.

### PCR Amplification

[0189] For PCR amplification the following mix was used: genomic DNA (25 ng/μl, 2 μl), 5×HF Phusion™ buffer (10 μl), dNTP 10 mM (1 μl), forward primer (100 ng/μl, 1 μl), reverse primer (100 ng/μl, 1 μl), water (34.75 μl) and Phusion™ enzyme (2U/μl, 0.25 μl). PCR amplification was as follows: denaturation at 98° C. for 30 sec. followed by (98° C.-10 sec, 60° C.-20 sec. and 72° C. 45 sec. to 1 min) for 35 cycles; and 72° C. for 5 minutes as a final elongation cycle.

### Surveyor Nuclease Assay for Confirmation of Genome Modification

[0190] After transfection, SH-SY5Y or 293T cells were incubated at 37° C. for 72 hrs and genomic DNA was extracted as described above. The genomic region of exon 16 of the APP gene was PCR amplified with different forward primers Fb, Fc and different reverse primers Rb, Rc using Phusion™ DNA Polymerase (New England Biolabs Inc.) as described in genomic PCR amplification section. After the PCR amplification, 20 μl of unpurified PCR products were heated at 95° C. for 5 minutes and slowly cooled down (5° C. per 30 seconds) to 25° C. using a thermocycler. After the formation of heteroduplexes, 1 μL of surveyor enzyme (Transgenomics Inc. Omaha, Nebr., USA) and 1 μL of enhancer in Phusion™ HF Buffer (NEB Inc.) were added with to each tube to obtain a 1× final concentration. The mixes were incubated at 42° C. for 25 to 60 minutes. 5 μl of loading buffer were added to each tube. All Surveyor analyses were done on 2% agarose gels containing RedSafe™ Nucleic Acid staining solution (Froggabio Inc., Toronto, ON, Canada) for UV visualization.

### Deep Sequencing Analysis

[0191] Deep sequencing samples were prepared by a PCR reaction with special primers containing a bar code sequence (BCS) sequences to permit the subsequent sequencing.

BCS1:
(SEQ ID NO: 121)
ACACTGACGACATGGTTCTACA
BCS2:
(SEQ ID NO: 122)
TACGGTAGCAGAGACTTGGTCT

[0192] DNA sequences were analyzed with the Illumina sequencer. Roughly 10000 reads were obtained per sample.

### Results

[0193] The deep sequencing results permitted to determine the percentage of deamination (i.e., a cytidine changed into a thymidine) obtained for each cytidine (C1 to C5) present in the target window. As indicated in FIG. 6, the best deamination percentages were obtained with the Cas9-VQR-BE3 enzyme with a guide RNA targeting 20 nucleotides. Higher percentages of deamination were obtained when 2 sequences coding for the guide RNA were present in the plasmid. However, with this enzyme, the C1 nucleotide was deaminated more frequently than the C2 nucleotide.

[0194] The experiment was thus repeated with various Cas9-deaminases. The Target-AID-Cas9-VQR permitted to deaminate a higher percentage of cytidines (FIG. 7). With this enzyme, the same deamination profile was observed in the 293T cells and in the SH-SY5Y cells. However, a higher deamination percentage of deamination was obtained in the 293T cells, because these cells were transfected more efficiently. The percentage of deamination of C1 and C2 were higher in the SH-SY5Y and the 293T cells with Target-AID-Cas9VQR deaminase than with the other variants (FIG. 7).

[0195] The YE1 variant of APOBEC1 contains two mutations W90Y and R126E. We also tested this YE1 variant fused with various SpCas9n. The YE1 variant fused with the SpCas9n variant was reported to create a narrower conversion window⁷². However, this cytidine deaminase variant produced a very low percentage of conversion of cytidine into thymidine in exon 16 of the APP gene (FIG. 8).

[0196] Overall, the EQR variant of SpCas9 and SaCas9-deaminase produced lower deamination rates than the VQR variant of SpCas9 VQR (FIG. 9).

[0197] The guide length (i.e., the number of nucleotides to which the guide RNA is binding) also plays an important role in the deamination efficacy and the conversion range. We thus tested guide RNAs binding to 19, 20, 21 or 22 nucleotides. The best deamination of the C2 nucleotide was obtained with the Target-AID Cas9-VQR with a guide RNA binding with 19 nucleotides (FIG. 10).

[0198] The experiment was repeated with Target-AID-Cas9_{VQR}, BE3-Cas9_{VQR} combined with guide RNA targeting 17, 18, 19 or 20 nucleotides. The highest percentage of deamination of the nucleotides C1 and C2 were obtained with the Target-AID-Cas9_{VQR} used with guide RNAs targeting 19 or 20 nucleotides (FIG. 11). BE3-Cas9VQR (FIG. 11) and BE4-Cas9VQR (FIG. 10) variants showed a different profile than Target-AID variants. Thus BE3-Cas9_{VQR} and BE4-Cas9_{VQR} promote C1 and C3 deamination whereas Target-AID promotes C1 and C2 deamination.

[0199] The best results were obtained with the Target-AID-SpCas9n_{VQR} nickase in combination with guide RNA reacting with 19 nucleotides (FIG. 12). Indeed, more than 50% of C1 and C2 were modified into thymines.

### Example 3: Deamination of APP Containing a FAD Mutation

[0200] The next experiment was to directly deaminate plasmids coding for APP containing one mutation responsible for a Familial Alzheimer disease (FAD). We selected the 10 FAD mutations for which the presence of the additional A673T mutation led in preliminary experiments to a strong reduction of the formation of Aß42 peptides. SH-SY5Y cells were transfected with one of these APP plasmids containing a FAD mutation, with the Target-AID-SpCas9n_{VQR} plasmid containing two copies of the guide RNA targeting 19 nucleotides. The cell culture supernatant was harvested to analyse with the Meso Scale Discovery (MSD) the concentration of Aß40 and of Aß42 peptides. The genomic DNA and plasmid DNA were also extracted for deep sequencing. The deep sequencing results showed a strong global deamination activity (FIG. 13).

[0201] Interestingly, as observed in FIG. 14, we found different deamination profiles with APP plasmids containing different FAD mutations. Indeed, C1 is not as frequently deaminated as C2, which corresponds to our aim of producing the A673T mutation. The ten best FAD mutations showed between 5.3-19.4% deamination of C2, despite the fact that the transfected cells were not selected.

[0202] We produced with lentivirus infection different SH-SY5Y cell lines that constitutively express Target-AID-SpCas9n_{VQR} with a guide RNA targeting either 17 (see FIG. 8) or 19 nucleotides. These cells were subsequently transfected with APP plasmids coding for one of the 10 FAD mutations or for the three mutations (the Swedish mutation KM670/671NL, the Arctic mutation E693G and the Beyreuther/Iberian mutation 1716F) present in the NL/G//F Alzheimer mouse model developed by Saito et al.⁷³. This experiment produced very interesting results (FIGS. 15, 16 and 17).

[0203] We observed decreases of the Aβ 42 peptide in the culture medium: 40% with plasmids coding for the wild type APP, 43% with an APP plasmid coding for the NL/G/F mutations present in the Alzheimer mouse model and 24% with APP plasmid containing the London mutation (V717I), another Alzheimer mouse model for which we have recently obtained cells from the Remynd company in Belgium.

### Example 4: Inducing the APP A673V Mutation

[0204] The alanine codon in position 673 is GCA, it was thus possible to deaminate the cytidine into a thymidine to produce the GTA codon for valine. We have tested different Cas9n-cytidine deaminase enzymes: BE3_SpCas9n, BE4-Gam_SpCas9n and Target AID_SpCas9n to target a NGG PAM in the sense strand. We also tested the BE3_SpCas9n-VQR, BE4-Gam_SpCas9n-VQR, Target-AID_SpCas9n-VQR variants targeting a NGAN PAM in the sense strand.

[0205] We have thus transfected the human neuroblastoma SH-SY5Y cells with a plasmid coding for each of the deaminases listed above and for a guide RNA targeting the 20 nucleotides 5′ of their respective PAM. The sequences targeted by the guide RNAs are 5′GCAGAATTCCGACATGACTC 3′ (SEQ ID NO: 123) for the NGG PAM (this PAM is indicated in FIG. 18), 5′ATGGATGCAGAATTCCGACA3′ (SEQ ID NO: 124) for the NGAN PAM and 5′ TGCAGAATTCCGACATGACT3′ (SEQ ID NO: 125) for the NNNRRT PAM (see Table 4). The DNA was extracted 3 days later and exon 16 of the APP gene was PCR amplified. Among all the variants, only BE4-Gam_SpCas9n and Target AID_SpCas9n gave positive Surveyor enzyme results. The amplicons were sent for deep sequencing to obtain 10,000 sequences to evaluate the percentage of intended mutation. Table 5 gives the results for Target AID_SpCas9n, which was the most efficient deaminase to modify the first C in the targeted sequence. As indicated in that table 27.82% of the first cytidine located in position 2 of the protospacer was deaminated to a thymidine. The other cytidines in the protospacer sequence were not deaminated compared with the untreated negative control. The results are illustrated in FIG. 19. Thus the deamination of the first C in the protospacer sequence of Target-AID_SpCas9n permits to change the alanine codon (GCA) in position 673 into a GTA codon for valine. This A673V mutation is protective for Alzheimer when it is heterozygote.

TABLE 4
PAM and Protospacer sequences
for different Cas9-deaminases

| | | | SEQ |
|---|---|---|---|
| Deaminase | | Protospacer | ID |
| name | PAM | sequence | NO: |
| BE3_SpCas9n | 5′AGG3′ | 5′ GCAGAATTCC | 126 |
| | | GACATGACTC 3′ | |
| BE4-Gam_ | 5′AGG3′ | 5′ GCAGAATTCC | 127 |
| SpCas9n | | GACATGACTC 3′ | |
| TargetAID_ | 5′AGG3′ | 5′ GCAGAATTCC | 128 |
| SpCas9n | | GACATGACTC 3′ | |
| BE3_SpCas9n- | 5′TGAC3′ | 5′ ATGGATGCAG | 129 |
| VQR | | AATTCCGACA 3′ | |
| BE4-Gam_ | 5′TGAC3′ | 5′ ATGGATGCAG | 130 |
| SpCas9n-VQR | | AATTCCGACA 3′ | |
| TargetAID_ | 5′TGAC3′ | 5′ ATGGATGCAG | 131 |
| SpCas9n-VQR | | AATTCCGACA 3′ | |
| BE3_ | 5′CAGGAT3′ | 5′ TGCAGAATTC | 132 |
| SaCas9nKKH | | CGACATGACT 3′ | |
| Target-AID_ | 5′CAGGAT3′ | 5′ TGCAGAATTC | 133 |
| SaCas9nKKH | | CGACATGACT 3′ | |

TABLE 5
Percentage of deamination with various Cas9 deaminase
for the cytidines present in the protospacer sequence

| Enzyme | C1 | C2 | C3 | C4 | C5 | C6 | C1 + C2 | C1 + C2 + C3 |
|---|---|---|---|---|---|---|---|---|
| BE3_SpCas9n | 0.05 | 1.97 | 0.04 | 0.02 | 0.03 | 0.01 | 0.01 | 0.02 |
| BE4-Gam_SpCas9n | 0.04 | 5.21 | 0.05 | 0.03 | 0.04 | 0.02 | 0.00 | 0.00 |
| Target AID_SpCas9n | 27.82 | 0.27 | 0.12 | 0.02 | 0.03 | 0.03 | 1.31 | 0.32 |
| BE3_SpCas9n-VQR | 0.12 | 0.63 | 0.05 | 0.04 | 0.02 | 0.03 | 0.08 | 0.00 |
| BE4-Gam_SpCas9n-VQR | 0.50 | 0.21 | 0.05 | 0.01 | 0.05 | 0.02 | 0.02 | 0.00 |
| Target AID_SpCas9n-VQR | 0.07 | 0.02 | 0.04 | 0.01 | 0.01 | 0.00 | 0.00 | 0.00 |
| BE3_SaCas9nKKH | 0.05 | 2.99 | 0.03 | 0.03 | 0.04 | 0.03 | 0.00 | 0.00 |
| Target-AID_SaCas9nKKH | 0.17 | 0.03 | 0.04 | 0.03 | 0.02 | 0.01 | 0.00 | 0.00 |
| Control GFP 1 | 0.05 | 0.03 | 0.06 | 0.02 | 0.03 | 0.06 | 0.00 | 0.00 |
| Control GFP 2 | 0.02 | 0.02 | 0.03 | 0.04 | 0.06 | 0.01 | 0.00 | 0.00 |
| 2nd exp. BE3_SpCas9n | 0.03 | 0.03 | 0.02 | 0.04 | 0.05 | 0.06 | 0.00 | 0.00 |
| 2nd exp. BE4-Gam_SpCas9n | 0.06 | 0.04 | 0.06 | 0.04 | 0.03 | 0.02 | 0.00 | 0.00 |
| 2nd exp. Target AID_SpCas9n | 18.48 | 0.19 | 0.09 | 0.03 | 0.03 | 0.02 | 1.69 | 0.11 |

### Example 5: Inducing the APP H684R Mutation

[0206] The H684R mutation required the deamination of the A in the CAT histidine codon in position 684 (FIG. 18) to produce the CGT codon for arginine. This was done using the adenine base editor (ABE)²³. This base editing enzyme used the SpCas9 enzyme and thus required a NGG PAM. There was such a PAM at 12 nucleotides from the target A (FIG. 18). Thus the target A was at position 9 in the protospacer sequence 5′TGAAGTTCATCATCAAAAAT3′ (SEQ ID NO: 134) targeted by a guide RNA (underlined in FIG. 18).

[0207] Since the efficacy of various ABEs varied depending of the position of the target A in the protospacer, we tested different ABE variants produced by Gaudelli et al.²³ (ABE6.3, ABE7.8, ABE7.9 and ABE7.10). Plasmids coding for these different adenosine base editors were obtained from AddGene Inc. respectively plasmids #102916, 102917, 102918 and 102674.

[0208] We also tested an adenosine deaminase fused with the KKH variant of SaCas9⁷¹ since there was an NNNRRT PAM (FIG. 18) at 19 nucleotides from the target A. The protospacer sequence targeted by the guide RNA is underlined and it is: CATCATCAAAAATTGGTACG (SEQ ID NO: 135).

[0209] The experiment was done in SH-SY5Y and exon 16 was PCR amplified and deep sequenced to establish the percentage of A to G mutation.

### Example 6: Inducing the APP H684R Mutation in the mRNA

[0210] To produce the desired H684R mutation, the A nucleotide in the CAT histidine codon in position 684 of the mRNA had to be modified into a G to produce the CGT codon for arginine. 100 000 SH-Sy5y neuroblastoma cells were plated, per well in a 24 wells plate. The following day, these cells were transfected with 400 ng of dPspCas13b-ADAR2DD (REPAIRv2, Addgene #103871) plasmid and 400 ng of Cas13 crRNA plasmid coding for a 50 nucleotides guide targeting the APP mRNA. Two versions of the guide RNA were tested targeting different parts of the APP mRNA. For one of the guide RNA, the target A was in front of position 35. For the other guide RNA the target A was in position 45. In the guide RNA, the nucleotide in front of the target A was a C (in bold in the sequences) to create a mismatch.

The sequence coding for a guide RNA in
which the mismatch is in position 45 is:
(SEQ ID NO: 136)
5′ GATGACGAACTTCATATCCTGAGTC
ATGTCGGAATTCTGCATCCATCTTC 3′
While the sequence coding for the guide
RNA in which the mismatch is in
position 35 is:
(SEQ ID NO: 137)
5′ GACCAATTTTTGATGACGAACTTCAT
ATCCTGAGTCATGTCGGAATTCTGC 3′

[0211] One control was transfected with 400 ng of dPspCas13b-ADAR2_{DD} (REPAIRv2) plasmid and 400 ng of eGFP plasmid instead of Cas13 crRNA plasmid. One other control was transfected with 800 ng of eGFP plasmid alone. 72 hrs after transfection, the RNA was extracted with Trizol reagent. For each sample, 1 μg of RNA was reverse transcribed. The cDNA of each sample was PCR amplified using primer specific for exon 14 and exon 17 of the APP cDNA. At the 5′ end of forward and at the 3′ end of the reverse primers, sequences required for Illumina deep sequencing were added.

[0212] The deep sequencing results indicated that the A nucleotide in the CAT histidine codon in the mRNA was modified into a G to produce the CGT codon for arginine in 1.3% of the sequences (Table 6). Thus it is possible to introduce by RNA base editing the H684R mutation, which is protective against AD.

TABLE 6
Percentage of H684R mutations

| | | His codon | Arg codon | |
|---|---|---|---|---|
| Sample | n | CAT | CGT | % |
| ADAR Guide35 | 99846 | 96939 | 1246 | 1.3 |
| ADAR Guide45 | 94104 | 91975 | 657 | 0.7 |
| Control Cas13 only | 89198 | 87059 | 131 | 0.2 |
| Control GFP | 93372 | 91770 | 84 | 0.1 |

TABLE 7
Sequences described herein

| SEQ ID | |
|---|---|
| NO(s) | Description |
| 1, 2 | Human APP nucleotide and amino acid sequences |
| 3, 4 | BE3_SpCas9nVQR nucleotide and amino acid sequences |
| 5, 6 | BE3_SpCas9nEQR nucleotide and amino acid sequences |
| 7, 8 | BE3_SaCas9nKKH nucleotide and amino acid sequences |
| 9, 10 | YE1-BE3 nucleotide and amino acid sequences |
| 11, 12 | YE1-BE3_SpCas9nVQR nucleotide and amino acid |
| | sequences |
| 13, 14 | YE1-BE3_SpCas9nEQR nucleotide and amino acid |
| | sequences |
| 15, 16 | YE1-BE3_SaCas9nKKH |
| 17, 18 | BE4-GAM_SpCas9nVQR |
| 19, 20 | BE4-GAM_SpCas9nEQR |
| 21, 22 | Target-AID SpCas9nVQR nucleotide and amino acid |
| | sequences |
| 23, 24 | Target-AID SpCas9nEQR nucleotide and amino acid |
| | sequences |
| 25, 26 | Target-AID SaCas9nKKH nucleotide and amino acid |
| | sequences |
| 27, 28 | hADAR2 nucleotide and amino acid sequences |
| 29, 30 | REPAIRv2 nucleotide and amino acid sequences |
| 31, 32 | ABE6.3 nucleotide and amino acid sequences |
| 33, 34 | ABE7.8 nucleotide and amino acid sequences |
| 35, 36 | ABE7.9 nucleotide and amino acid sequences |
| 37, 38 | ABE7.10 nucleotide and amino acid sequences |
| 39, 40 | FIG. 18, sense and antisense sequences |
| 41 | FIG. 18, amino acid sequence |
| 42, 43 | FIG. 21, nucleotide and amino acid sequences |
| 44 | FIG. 22, nucleotide sequence |
| 45 | FIG. 2, amino acid sequence |
| 46, 47 | FIG. 5B, sense and antisense sequences |
| 48 | FIG. 5B, amino acid sequence |
| 49, 50 | FIG. 5C, sense and antisense sequences |
| 51 | FIG. 5C, amino acid sequence |
| 52 | FIG. 5A, nucleotide sequence |
| 53-76 | Target sequences for A673T mutation |
| 77-82 | Target sequences for A673V mutation |
| 83-94 | Target sequences for H684R mutation |
| 95-100 | Nuclear localization signals (NLSs) |
| 101-106 | Protein transduction domains (PTDs) |
| 107-117 | Endosomal escape peptides (Table 1) |
| 118-119 | TAT PDTs |
| 120 | Pep-1 PTD |
| 121, 122 | BCS1 and BCS2 primers |
| 123-125 | Target sequences |
| 126-133 | Protospacer sequences (Table 4) |
| 134, 135 | Protospacer sequences |
| 136, 137 | Guide RNA coding sequences |
| 138-148 | Guide RNA sequences |

[0213] The scope of the claims should not be limited by the preferred embodiments set forth in the examples, but should be given the broadest interpretation consistent with the description as a whole.

### REFERENCES

[0214] 1. Ferri, CP, Prince, M, Brayne, C, Brodaty, H, Fratiglioni, L, Ganguli, M, et al. (2005). Global prevalence of dementia: a Delphi consensus study. Lancet 366: 2112-2117.
[0215] 2. Plassman, BL, Langa, KM, Fisher, GG, Heeringa, SG, Weir, DR, Ofstedal, M B, et al. (2007). Prevalence of dementia in the United States: the aging, demographics, and memory study. Neuroepidemiology 29: 125-132.
[0216] 3. Qiu, C, Kivipelto, M, and von Strauss, E (2009). Epidemiology of Alzheimer's disease: occurrence, determinants, and strategies toward intervention. Dialogues in clinical neuroscience 11: 111-128.
[0217] 4. Masters, CL, Multhaup, G, Simms, G, Pottgiesser, J, Martins, R N, and Beyreuther, K (1985). Neuronal origin of a cerebral amyloid: neurofibrillary tangles of Alzheimer's disease contain the same protein as the amyloid of plaque cores and blood vessels. EMBO J 4: 2757-2763.
[0218] 5. Zhang, YW, Thompson, R, Zhang, H, and Xu, H (2011). APP processing in Alzheimer's disease. Molecular brain 4: 3.
[0219] 6. Hussain, I, Powell, D, Howlett, DR, Tew, DG, Meek, TD, Chapman, C, et al. (1999). Identification of a novel aspartic protease (Asp 2) as beta-secretase. Mol Cell Neurosci 14: 419-427.
[0220] 7. Sinha, S, Anderson, JP, Barbour, R, Basi, GS, Caccavello, R, Davis, D, et al. (1999). Purification and cloning of amyloid precursor protein beta-secretase from human brain. Nature 402: 537-540.
[0221] 8. Schmitt, HP (2006). Protein ubiquitination, degradation and the proteasome in neuro-degenerative disorders: no clear evidence for a significant pathogenetic role of proteasome failure in Alzheimer disease and related disorders. Med Hypotheses 67: 311-317.
[0222] 9. Bignante, EA, Heredia, F, Morfini, G, and Lorenzo, A (2013). Amyloid beta precursor protein as a molecular target for amyloid beta-induced neuronal degeneration in Alzheimer's disease. Neurobiology of aging 34: 2525-2537.
[0223] 10. Komor, AC, Zhao, KT, Packer, M S, Gaudelli, N M, Waterbury, A L, Koblan, L W, et al. (2017). Improved base excision repair inhibition and bacteriophage Mu Gam protein yields C:G-to-T:A base editors with higher efficiency and product purity. Sci Adv 3: eaao4774.
[0224] 11. Kero, M, Paetau, A, Polvikoski, T, Tanskanen, M, Sulkava, R, Jansson, L, et al. (2013). Amyloid precursor protein (APP) A673T mutation in the elderly Finnish population. Neurobiology of aging 34: 1518 e1511-1513.
[0225] 12. Jonsson, T, Atwal, JK, Steinberg, S, Snaedal, J, Jonsson, PV, Bjornsson, S, et al. (2012). A mutation in APP protects against Alzheimer's disease and age-related cognitive decline. Nature 488: 96-99.
[0226] 13. Di Fede, G, Catania, M, Morbin, M, Giaccone, G, Moro, ML, Ghidoni, R, et al. (2012). Good gene, bad gene: new APP variant may be both. Prog Neurobiol 99: 281-292.
[0227] 14. Cantu, L, Colombo, L, Stoilova, T, Deme, B, Inouye, H, Booth, R, et al. (2017). The A2V mutation as a new tool for hindering Abeta aggregation: A neutron and x-ray diffraction study. Scientific reports 7: 5510.
[0228] 15. Kimura, A, Hata, S, and Suzuki, T (2016). Alternative Selection of beta-Site APP-Cleaving Enzyme 1 (BACE1) Cleavage Sites in Amyloid beta-Protein Precursor (APP) Harboring Protective and Pathogenic Mutations within the Abeta Sequence. J Biol Chem 291: 24041-24053.
[0229] 16. Cox, DBT, Gootenberg, J S, Abudayyeh, O O, Franklin, B, Kellner, MJ, Joung, J, et al. (2017). RNA editing with CRISPR-Cas13. Science 358: 1019-1027.
[0230] 17. Wettengel, J, Reautschnig, P, Geisler, S, Kahle, P J, and Stafforst, T (2017). Harnessing human ADAR2 for RNA repair—Recoding a PINK1 mutation rescues mitophagy. Nucleic Acids Res 45: 2797-2808.
[0231] 18. St George-Hyslop, PH (2000). Molecular genetics of Alzheimer's disease. Biological psychiatry 47: 183-199.
[0232] 19. Di Fede, G, Catania, M, Morbin, M, Rossi, G, Suardi, S, Mazzoleni, G, et al. (2009). A recessive mutation in the APP gene with dominant-negative effect on amyloidogenesis. Science 323: 1473-1477.
[0233] 20. Giaccone, G, Morbin, M, Moda, F, Botta, M, Mazzoleni, G, Uggetti, A, et al. (2010). Neuropathology of the recessive A673V APP mutation: Alzheimer disease with distinctive features. Acta Neuropathol 120: 803-812.
[0234] 21. Maloney, JA, Bainbridge, T, Gustafson, A, Zhang, S, Kyauk, R, Steiner, P, et al. (2014). Molecular mechanisms of Alzheimer disease protection by the A673T allele of amyloid precursor protein. J Biol Chem 289: 30990-31000.
[0235] 22. Cimini, S, Sclip, A, Mancini, S, Colombo, L, Messa, M, Cagnotto, A, et al. (2016). The cell-permeable Abeta1-6A2VTAT(D) peptide reverts synaptopathy induced by Abeta1-42 wt. Neurobiol Dis 89: 101-111.
[0236] 23. Gaudelli, N M, Komor, AC, Rees, HA, Packer, M S, Badran, AH, Bryson, D I, et al. (2017). Programmable base editing of A*T to G*C in genomic DNA without DNA cleavage. Nature 551: 464-471.
[0237] 24. Anzalone, AV, Randolph, PB, Davis, JR, Sousa, AA, Koblan, LW, Levy, J M, et al. (2019). Search-and-replace genome editing without double-strand breaks or donor DNA. Nature.
[0238] 25. Gaj, T, Gersbach, C A, and Barbas, CF, 3rd (2013). ZFN, TALEN, and CRISPR/Cas-based methods for genome engineering. Trends Biotechnol 31: 397-405.
[0239] 26. Arnould, S, Delenda, C, Grizot, S, Desseaux, C, Paques, F, Silva, G H, et al. (2011). The I-Crel meganuclease and its engineered derivatives: applications from cell modification to gene therapy. Protein engineering, design & selection: PEDS 24: 27-31.
[0240] 27. Menke, DB (2013). Engineering subtle targeted mutations into the mouse genome. Genesis 51: 605-618.
[0241] 28. Mali, P, Yang, L, Esvelt, KM, Aach, J, Guell, M, DiCarlo, J E, et al. (2013). RNA-guided human genome engineering via Cas9. Science 339: 823-826.
[0242] 29. Jinek, M, Chylinski, K, Fonfara, I, Hauer, M, Doudna, J A, and Charpentier, E (2012). A programmable dual-RNA-guided DNA endonuclease in adaptive bacterial immunity. Science 337: 816-821.
[0243] 30. Cong, L, Ran, FA, Cox, D, Lin, S, Barretto, R, Habib, N, et al. (2013). Multiplex genome engineering using CRISPR/Cas systems. Science 339: 819-823.
[0244] 31. Komor, AC, Kim, YB, Packer, M S, Zuris, J A, and Liu, DR (2016). Programmable editing of a target base in genomic DNA without double-stranded DNA cleavage. Nature 533: 420-424.
[0245] 32. Hou, Z, Zhang, Y, Propson, N E, Howden, SE, Chu, LF, Sontheimer, E J, et al. (2013). Efficient genome engineering in human pluripotent stem cells using Cas9 from Neisseria meningitidis. Proc Natl Acad Sci USA 110: 15644-15649.
[0246] 33. Deltcheva, E, Chylinski, K, Sharma, CM, Gonzales, K, Chao, Y, Pirzada, Z A, et al. (2011). CRISPR RNA maturation by trans-encoded small RNA and host factor RNase III. Nature 471: 602-607.
[0247] 34. Sapranauskas, R, Gasiunas, G, Fremaux, C, Barrangou, R, Horvath, P, and Siksnys, V (2011). The Streptococcus thermophilus CRISPR/Cas system provides immunity in Escherichia coli. Nucleic Acids Res 39: 9275-9282.
[0248] 35. Fonfara, I, Le Rhun, A, Chylinski, K, Makarova, K S, Lecrivain, A L, Bzdrenga, J, et al. (2014). Phylogeny of Cas9 determines functional exchangeability of dual-RNA and Cas9 among orthologous type II CRISPR-Cas systems. Nucleic Acids Res 42: 2577-2590.
[0249] 36. Ran, FA, Cong, L, Yan, WX, Scott, DA, Gootenberg, J S, Kriz, A J, et al. (2015). In vivo genome editing using Staphylococcus aureus Cas9. Nature 520: 186-191.
[0250] 37. P, C, N, J, and J M, J (2018). Minimal PAM specificity of a highly similar SpCas9 ortholog. Sci Adv 4.
[0251] 38. Smith, T F, and Waterman, M S (1981). Comparison of biosequences. Adv Appl Math 2: 482-489.
[0252] 39. Needleman, S B, and Wunsch, CD (1970). A general method applicable to the search for similarities in the amino acid sequence of two proteins. J Mol Biol 48: 443-453.
[0253] 40. Pearson, W R, and Lipman, DJ (1988). Improved tools for biological sequence comparison. Proc Natl Acad Sci USA 85: 2444-2448.
[0254] 41. Altschul, SF, Gish, W, Miller, W, Myers, E W, and Lipman, DJ (1990). Basic local alignment search tool. J Mol Biol 215: 403-410.
[0255] 42. Mullan, M, Crawford, F, Axelman, K, Houlden, H, Lilius, L, Winblad, B, et al. (1992). A pathogenic mutation for probable Alzheimer's disease in the APP gene at the N-terminus of beta-amyloid. Nat Genet 1: 345-347.
[0256] 43. Moro, ML, Giaccone, G, Lombardi, R, Indaco, A, Uggetti, A, Morbin, M, et al. (2012). APP mutations in the Abeta coding region are associated with abundant cerebral deposition of Abeta38. Acta Neuropathol 124: 809-821.
[0257] 44. Janssen, JC, Beck, JA, Campbell, TA, Dickinson, A, Fox, N C, Harvey, R J, et al. (2003). Early onset familial Alzheimer's disease: Mutation frequency in 31 families. Neurology 60: 235-239.
[0258] 45. Wakutani, Y, Watanabe, K, Adachi, Y, Wada-lsoe, K, Urakami, K, Ninomiya, H, et al. (2004). Novel amyloid precursor protein gene missense mutation (D678N) in probable familial Alzheimer's disease. J Neurol Neurosurg Psychiatry 75: 1039-1042.
[0259] 46. Brouwers, N, Sleegers, K, and Van Broeckhoven, C (2008). Molecular genetics of Alzheimer's disease: an update. Ann Med 40: 562-583.
[0260] 47. Hendriks, L, van Duijn, CM, Cras, P, Cruts, M, Van Hul, W, van Harskamp, F, et al. (1992). Presenile dementia and cerebral haemorrhage linked to a mutation at codon 692 of the beta-amyloid precursor protein gene. Nat Genet 1: 218-221.
[0261] 48. Tomiyama, T, Nagata, T, Shimada, H, Teraoka, R, Fukushima, A, Kanemitsu, H, et al. (2008). A new amyloid beta variant favoring oligomerization in Alzheimer's-type dementia. Ann Neurol 63: 377-387.
[0262] 49. Kamino, K, Orr, HT, Payami, H, Wijsman, E M, Alonso, M E, Pulst, S M, et al. (1992). Linkage and mutational analysis of familial Alzheimer disease kindreds for the APP gene region. Am J Hum Genet 51: 998-1014.
[0263] 50. Grabowski, TJ, Cho, HS, Vonsattel, JP, Rebeck, G W, and Greenberg, SM (2001). Novel amyloid precursor protein mutation in an Iowa family with dementia and severe cerebral amyloid angiopathy. Ann Neurol 49: 697-705.
[0264] 51. Carter, DA, Desmarais, E, Bellis, M, Campion, D, Clerget-Darpoux, F, Brice, A, et al. (1992). More missense in amyloid gene. Nat Genet 2: 255-256.
[0265] 52. Pasalar, P, Najmabadi, H, Noorian, A R, Moghimi, B, Jannati, A, Soltanzadeh, A, et al. (2002). An Iranian family with Alzheimer's disease caused by a novel APP mutation (Thr714A1a). Neurology 58: 1574-1575.
[0266] 53. Kumar-Singh, S, De Jonghe, C, Cruts, M, Kleinert, R, Wang, R, Mercken, M, et al. (2000). Nonfibrillar diffuse amyloid deposition due to a gamma(42)-secretase site mutation points to an essential role for N-truncated A beta(42) in Alzheimer's disease. Hum Mol Genet 9: 2589-2598.
[0267] 54. Cruts, M, Dermaut, B, Rademakers, R, Van den Broeck, M, Stogbauer, F, and Van Broeckhoven, C (2003). Novel APP mutation V715A associated with presenile Alzheimer's disease in a German family. J Neurol 250: 1374-1375.
[0268] 55. Ancolio, K, Dumanchin, C, Barelli, H, Warter, J M, Brice, A, Campion, D, et al. (1999). Unusual phenotypic alteration of beta amyloid precursor protein (betaAPP) maturation by a new Val-715->Met betaAPP-770 mutation responsible for probable early-onset Alzheimer's disease. Proc Natl Acad Sci USA 96: 4119-4124.
[0269] 56. Guardia-Laguarta, C, Pera, M, Clarimon, J, Molinuevo, J L, Sanchez-Valle, R, Llado, A, et al. (2010). Clinical, neuropathologic, and biochemical profile of the amyloid precursor protein 1716F mutation. J Neuropathol Exp Neurol 69: 53-59.
[0270] 57. Blauwendraat, C, Wilke, C, Jansen, IE, Schulte, C, Simon-Sanchez, J, Metzger, F G, et al. (2016). Pilot whole-exome sequencing of a German early-onset Alzheimer's disease cohort reveals a substantial frequency of PSEN2 variants. Neurobiology of aging 37: 208 e211-208 e217.
[0271] 58. Terreni, L, Fogliarino, S, Franceschi, M, and Forloni, G (2002). Novel pathogenic mutation in an Italian patient with familial Alzheimer's disease detected in APP gene. Neurobiol Aging 23(1S): 319.
[0272] 59. Eckman, CB, Mehta, N D, Crook, R, Perez-tur, J, Prihar, G, Pfeiffer, E, et al. (1997). A new pathogenic mutation in the APP gene (1716V) increases the relative proportion of A beta 42(43). Hum Mol Genet 6: 2087-2089.
[0273] 60. Murrell, J, Farlow, M, Ghetti, B, and Benson, M D (1991). A mutation in the amyloid precursor protein associated with hereditary Alzheimer's disease. Science 254: 97-99.
[0274] 61. Chartier-Harlin, MC, Crawford, F, Houlden, H, Warren, A, Hughes, D, Fidani, L, et al. (1991). Early-onset Alzheimer's disease caused by mutations at codon 717 of the beta-amyloid precursor protein gene. Nature 353: 844-846.
[0275] 62. Goate, A, Chartier-Harlin, MC, Mullan, M, Brown, J, Crawford, F, Fidani, L, et al. (1991). Segregation of a missense mutation in the amyloid precursor protein gene with familial Alzheimer's disease. Nature 349: 704-706.
[0276] 63. Murrell, JR, Hake, A M, Quaid, K A, Farlow, M R, and Ghetti, B (2000). Early-onset Alzheimer disease caused by a new mutation (V717L) in the amyloid precursor protein gene. Arch Neurol 57: 885-887.
[0277] 64. Ghidoni, R, Albertini, V, Squitti, R, Paterlini, A, Bruno, A, Bernardini, S, et al. (2009). Novel T719P AbetaPP mutation unbalances the relative proportion of amyloid-beta peptides. J Alzheimers Dis 18: 295-303.
[0278] 65. Wang, Q, Jia, J, Qin, W, Wu, L, Li, D, Wang, Q, et al. (2015). A Novel AbetaPP M722K Mutation Affects Amyloid-beta Secretion and Tau Phosphorylation and May Cause Early-Onset Familial Alzheimer's Disease in Chinese Individuals. J Alzheimers Dis 47: 157-165.
[0279] 66. Kwok, JB, Li, QX, Hallupp, M, Whyte, S, Ames, D, Beyreuther, K, et al. (2000). Novel Leu723Pro amyloid precursor protein mutation increases amyloid beta42(43) peptide levels and induces apoptosis. Ann Neurol 47: 249-253.
[0280] 67. Theuns, J, Marjaux, E, Vandenbulcke, M, Van Laere, K, Kumar-Singh, S, Bormans, G, et al. (2006). Alzheimer dementia caused by a novel mutation located in the APP C-terminal intracytosolic fragment. Hum Mutat 27: 888-896.
[0281] 68. Kleinstiver, BP, Prew, M S, Tsai, SQ, Nguyen, NT, Topkar, VV, Zheng, Z, et al. (2015). Broadening the targeting range of Staphylococcus aureus CRISPR-Cas9 by modifying PAM recognition. Nat Biotechnol 33: 1293-1298.
[0282] 69. Kleinstiver, BP, Prew, M S, Tsai, SQ, Topkar, W, Nguyen, NT, Zheng, Z, et al. (2015). Engineered CRISPR-Cas9 nucleases with altered PAM specificities. Nature 523: 481-485.
[0283] 70. Nishida, K, Arazoe, T, Yachie, N, Banno, S, Kakimoto, M, Tabata, M, et al. (2016). Targeted nucleotide editing using hybrid prokaryotic and vertebrate adaptive immune systems. Science 353.
[0284] 71. Yang, L, Zhang, X, Wang, L, Yin, S, Zhu, B, Xie, L, et al. (2018). Increasing targeting scope of adenosine base editors in mouse and rat embryos through fusion of TadA deaminase with Cas9 variants. Protein & cell.
[0285] 72. Kim, YB, Komor, AC, Levy, J M, Packer, M S, Zhao, K T, and Liu, DR (2017). Increasing the genome-targeting scope and precision of base editing with engineered Cas9-cytidine deaminase fusions. Nat Biotechnol 35: 371-376.
[0286] 73. Saito, T, Matsuba, Y, Mihira, N, Takano, J, Nilsson, P, Itohara, S, et al. (2014). Single App knock-in mouse models of Alzheimer's disease. Nat Neurosci 17: 661-663.

The application's sequence listing, which the Patent Office published only in electronic form, follows.

SEQUENCE LISTING (148 sequences)

SEQ ID NO: 1 - DNA, 297272 bp, Homo sapiens
  CDS (5195)..(5251)
  CDS (63670)..(63837)
  CDS (85745)..(85874)
  CDS (122469)..(122581)
  CDS (124624)..(124817)
  CDS (153775)..(153977)
  CDS (175636)..(175803)
  CDS (178402)..(178458)
  CDS (193343)..(193476)
  CDS (199792)..(199866)
  CDS (200592)..(200750)
  CDS (220064)..(220192)
  CDS (221130)..(221229)
  CDS (263859)..(264080)
  CDS (270744)..(270797)
  CDS (278148)..(278248)
  CDS (283953)..(284099)
  CDS (294051)..(294149)
aaaaactgcccatcactggggaaaagaattttattatgcaaagcttcaacgctatttacagtttagacttttgtagctattgaaggctgacattgagataaagaagttaatcatgtccttctgtcttggaggaggtagaaagagatgagaatgaatacaattcaggatctacttctggtctttgatgaggagttagcacacggttctgggaggaaagacaggttaagaggcatgtgaaactctcaaatacgtcactgcgtctgccaacgtacatgatacccagcaagctcacatcttcatggaaagcatggtaattcccaacactaccggaagtctggagtggctaagtaatccatatattcaaccaggaagcagctaaagaaatattctaattacctaggaaggtttctgatttcaaaaggacatgaataaaaagtagaaggaatccactcccaaggacggacatcagagtagcttaaaatgtgagaataattttaggggaattttagaggtttggttatagacttatgttcccccaaaattcatatgttgaagccctaacccccagtaccttagaacatgactgtatttgggtagggcctttgaagagctaattaaattaaggccactggcgtgggccctaatataatctggctggtattcttgtaagaggaggagattaggacacacagaaataccagaggtacctgtgcagaggaaagaacgtgtgaggacttagcaagggtgcagccatctgcaagccaaggagacctctgaggattccaatcctatctgcatcttgatcttagacttttctggaactgtgagaaaataaatttcttggtttaagccacccagtctgtgatattttgttatggcagctctagtaaactaatacagattttaaatgtcattaaatgtcaatgtttaagctttgacaaaattttctaaaggaaagtataaaaggtcattttctttcttttcagagcctgatgattgcgggaggggtaagccagctgcatggggatcatgatgcaatgctgatgcaggacagacagaaagtagatctcttccatttctattttttttttttctgttgagttgaatgatcttcagactgaaaatgaaagaaaggtcactggaaataaaggccaaagatgagtgacaggattatagaataagtcttagctgttctaaagaaggacatattatgtacccccacccccaaattcatatgttgaagtcctaacccgacagtgtctcaaaatgtgaccatatttggagatagggtcaaagatgtaattaaggttaaatgaggtcattagcatggatcctaacccaatatctgctgtccttataacaagaggagattagggcacagtaagacacagagggaagaccatgtgagaatacagggagaaggtggccatctgcaagccaaggagagaggcctcagaagtaaccaactcagccaacacctcgatttcagacttccagcctcctgaaatgtgaggaaatacatttctggtgtttgatccatccagtctatggtaagttatggcacccctgcagggttcatctggctcagacttaacgattgcttttggtgatatttatagggcacagataacagcctaaacacaagacgacagaaacgcggcccagcagactatgcataaaatagaaatggggtatctggaccaattggagtctgcagtgggatgcggttactaaaacagtcaaatgcaacatgaggctccaggcagagtagtgggcaacatctcccatgttgcagcagtcagagcacacttcgagtactgtaaaaagacacagacaagccagaacacatttagagaatggccaaggtgtggaaggaaccagaaaccatgccattatgcaactgttgaaggaagtgcctgttttaccttgtgaagagaagactctagaggaagaagtagcatgaaaaccgctggcaaatttgtaaagatctgaagtgtggaaaagaattattctgcttggtcactggggatacaaggatatctgagtgggagtttaaaggcgggggatgtgagctttaaatgggataagaacattctagtaaccagaaatgcccaaagatagaatgcacagtctggagagccagtgaatatctcacaaatggagacacttgaaactaggatggggatgctgttgtaggaattccagcagacaagtggttgttggttccttccccaactttgtagggttataactagggatgttcctgcgttttctgcttggaggatctgcaagacacctcagggcaggaaatggcattaaatgcagaacagagctagtggctgaaaagcaaaaagccatcaggatctctgagtagtgaaggaaccagagaacatgcaggcaatgtccatcattctgacgcaatcagcagcataatcatcttcccccaggaacatcttgaccagggaatgtgtcagtgtggtgaatttcaacagtggaaagagaaactgctaaatctaagaactttaatttttatagattatgatctcatctctacaattttgaatttcatgctcaataaaagttccttactctctttttttttttttgagacggagtctcgctctgtcgcccaggctggagtgcagtggcgcgatctcggctcacttcaagctcagcctcccgggttcacgccattctcctgcctcagcctccccagtagctgggactacaggcgcccgccacgacgcccggctaattttttgtatttttagtagagacggggtttcaccgtgttagccaggatggtgttgatctcctgacctcgtgatccgcccgcctcagcctcccaaagaaaagtccctcactcttaaagttgcctcctccttcccagggctggcttcatgggcatgcaaccctggagagtctcacaggccctgcggtgggaggagccccatgcttggtttaacgctctgccattgccatcttaaaattcttaatttaattttttttcttttttttgaggtggagtctcgctctgtcgcccaggctggagtgcaatggcacaatcttggctcactgcaacctccgcctcccaggttcaagcgattctcctgcctcagcctctggagtagctgggattacaggcaggagtaaccacgctcggctaatttttgcatttttagtagagatgggggtttcaccatgttggccaggctggtctagaactcctgacctcaggtgatctgcccacctgggcctcctaaagtgctgggattacaggcatgagccaccaggcccggccttaaaattcttaataatgtaacaaagggtctcacgtttgcattttgcagtggactctgcaagatttgtagctttggaccacgtttctctttgcattcagataccttcttttttgccttatttgctcatgcagacccggaacaaatacggaattgcggtgggtaaatgtggtgcagaaagtgaacaactgggtttgtcctgtcactttaggcttttccctgctgtcccagcttcatgtcacttacttgctattagatttgggagttcattagcttcattttcctgatgtataaataggaataatagtaacagcctctttggcttttgtaggaagtaaatgacatgaagcgtataaacaaatactgcatgacaataaatatttgtccttatttgttgaggacatccaaaggacattcaggggcaaaagtaatccaagagtcaagactgaatgcctagtgcgggaaaagacacacaagacaacatttaggggagctggtacagaaatgacttcccaggaaggaagtctgtaccccgctggctgagccatccttcccgggcctaggcacccttgtcagcgcaatgagcaagggagagaaggcaggctgcagtgcagccctcagaagggccagagcactccctggcttcagtccttcgctccaagccctgtgtggagtgggctgtggcttggtaactaaatgctacttcaggtcaagagcaggggatatatctgggcagttctagagcattctaaactatctggacactaactggacagtggacggtttgtgtttaatccaggagaaagtggcatggcagaaggttcatttctataattcaggacagacacaatgaagaacaagggcagcgtttgaggtcagaagtcctcatttacgggggtcgaatacgaatgatctctcctaatttttccttcttccccaactcagatggatgttacatccctgcttaacaacaaaaaaagaccccccgccccgcaaaatccacactgaccaccccctttaacaaaacaaaaccaaaaacaaacaaaaatataagaaagaaacaaaacccaagcccagaaccctgctttcaagaagaagtaaatgggttggccgcttctttgccaggtcctgcgccttgctcctttggttcgttctaaagatagaaattccaggttgctcgtgcctgcttttgacgttgggggttaaaaaatgaggttttgctgtctcaacaagcaaagaaaatcctatttcctttaagcttcactcgttctcattctcttccagaaacgcctgccccacctctccaaaccgagagaaaaaacgaaatgcggataaaaacgcaccctagcagcagtcctttatacgacacccccgggaggcctgcggggtcggatgattcaagctcacggggacgagcaggagcgctctcgacttttctagagcctcagcgtcctaggactcacctttccctgatcctgcaccgtccctctcctggccccagactctccctcccactgttcacgaagcccaggtgggccgtcggccggggagcggagggggcgcgtggggtgcaggcggcgccaagggcgcgtgcacctgtgggcgcggggcgcgagggcccctcccggcgcgagcgggcgcagttccccggcggcgccgctaggggtctctctcgggtgccgagcggggtgggccggatcagctgactcgcctggctctgagccccgccgccgcgctcgggctccgtcagtttcctcggcagcggtaggcgagagcacgcggaggagcgtgcgcgggggccccgggagacggcggcggtggcggcgcgggcagagcaaggacgcggcggatcccactcgcacagcagcgcactcggtgccccgcgcagggtcgcgatgctgcccggtttggcactgctcctgctggccgcctggacggctcgggcgctggaggtgggtgccgcgcctcggaaggcggggggaggctgcacggtggggacgcgataccccccaagaccttaacccaagtctttaatgcagagaagccgggggtccgtcaatgggacccctctcctctccgcccccgcttgcggacgtccagcgcatccccgctttcggcccagccctgccccagggagtcgcgctccggcccgctgagagggagcgggcgaggcgctggtctccctggttccgcgccagcccggggcgagaagggtagggggcgaccctgagcccagaccccgacttagtccctgccttggaagcgggggtcgggggaggcgagagacattcagacaggggggaagggggaaggagcacgtggggaaaaccgaaaacgcagcgtccctaaagccagtccttcgctcttgaatcgttgccctttcctttctcttgggccctggggaggaggaggaggagtcgggacagcccaggaagctaggagcccctcgcttttccctgcgttctccgcctcgtttcaccttcctctctcacccccatcccccttccttgctccaacctcttttcgcggctgctggcggcggcagcctgggtgcgaccctagcccgagccggcgtcggggtcgcgcaccgccttccacaggcaaactttgtgcatgtccgcgtctcccttttgtgtaacttgcgagaaatgggaggggtcggagacccatagccaccccgcgccttccccaagtctggacgtcccgggagttcgctcgcaccctaagctctgtctgagaggcagaaggtccgcgggaacaaaagccgcgacaccccgccctcgccgtgggccgagccgcgttagtctcagtgcgccaccgaggctcccgcccggctcccttcccggggctgcgcgtccgcctgggagggggcagagacgctgccggggcttctggcggagcctcggggcccctctgcttcccaccctcggatcacctccgaggcttaattctgtgctgggctgtaaagtccttggcggggaggaaataaggcggagagtgggatgtgcgtctggaaagggcagtggcggatggtggggaggcacgggctctgtcctgtgcatccaaggaggcgtttgtctgattaaggcgcggcctcttccctggcagctctggggactctggtttagttcccctgggggcacaggatgctggggagggtccgaagggtcttttttttagggtgcagataaaaggatcgaattgagtgaagattaagacggagaagatggcgcctctgcagtgcagcaaagaaaagctgtgtggaggctgcagcctagtgaaatccacccaccactaggtgtataacaagtcttccccattcatccaactctcgaacattcagctaacgcctgtgcacaatgactgtttttctttacatctgaagatgcttagaagttgtttgcatgacagttgggccagaggaggctgtatttcacttcggacttcggttgggttcctgtttggcatcttaacatttgcaaccttccttacccgtttttcccctcttttcccccagcctcctagtaattttccaaaagaaaaaaagcaatttccgggcagatgttttcctgtaattccactgaggctgtacagactatcacaccattagttttttagtttctaatttgcaaggtcattgaacttttttctcttctgatttttacccacaagtggctcaggaatcaccttagggctagttaagacaggttgttttaagagttaaagaatttcgttttccatgttttaaaaaaatgcacttaactaagagaattctgatttctctcatgacttacttacatttatttgtagaattattccagttttcccgaatggtcttactacagattaaaaaccatacatttaaggaattaaaagcatatgataaccgtatttttgaagcttttgtcaaaacttaaatatgtaactttgttgagcaatatttctttctgtataaaaagaggaagcatgtaggcagattcgaatttagtttttggtctgtttaattgcattaatatgctctttctgccatcttttgggaccttttcagtagctattgttaactcctttaaagggtggaggtgagattcacattatgccattttgcgaagtgttggtagaagggtaggtaattcagtctactgaggtttgagggtggtttatctggttctctctgtgtccactgaaaagatgtaattacgagttgactgtcttttatagagcttagaaaataggtctgctgcaggtggctgtagaaaagaaatgaataagggcaatgataatggggccttggctatcgggggaaacatggttattatctgggttgatgattttggctggtatgttgatagaggtgtgagtttaacaaaccctaatctatatgatgtttcactaccctaatatttatttatttatttatttttaaatctagcttcctcttaagttttatttccctctgttgagggtttaacctagtcacaatcatcttacctttgtggtagtgctaatttatagtttatggaaacctgctgctactgactagtacctcgctaaaggtagaagccgacacacagaatagtaaagctcaggtttgatggtgatctgtaaggagtcacggttcttgctaatcgatgagaaaccatgataactggcagactgcagaagcttttctcttgtcaccggaaccagcagaggctcctgaacgacatttgcaaggctattagtactgcggagaagttactagatggaataatactggtcctgactgaggaaatgaaaaggaacatgcaagttcacgaggttaaatgaggaatggctgattcaaaaaaattaaaaagaaataacgtgatcaacaatattggtttgaaggaatgggagaggttgtctttatgttaagtcttgttgctagaggatctctattttatgttactgttttttgcatactagagtcttctacagatatttgtatgaatgttgtcagtcattctggaaataagcatagctattacttgcatttcacgtggccactaaactatcagtgagaagtgcattaaattcagtagaaatgtacattgtttctgcaaattgtattaccttgagaatcttacaaagcatctttcattaatacatttcttttaaaatctctatcaattacaaatgtaaagataaacctgtacagatgcattttaaatttaaagcttccagaatgtaaggtttagttcgactgcatacctcattacctccccttccctcctccctccccttactcccaggaagtttgcagggtaaataaaacatgcacatgataataaaacaaagtggaatgtactaaaataccaaaaggaaaatacagattaggtatactgagtaaatatgttacagagaaaacttcctgtatttaaaaagtaaggaacaatgggatgagatcatagataatcctggagcatttcctggtagtaaatttccagccaggtttatatcccaggtctggggattggaggttaagtttctgcatatacaatatttgtttacattcctctctgcctctaccagacagacagacagacacacacacacacacacacacacaccctctgtctctttctctctctttctctctctctctctctctctctctctctctctcacttgagtgacagatgctggtgcagggtattctcaacaggagtagggaatttgaaataaggagttgagaggtcaaaggtaaggggctgaatgcaggaccagagagcttcagtagcatcttgatgggcagagtatgagatgaacagtggcaacgaggaggatagggaaaaatcacattttctgtttgtgttttgtttttgtctggtggttttcaacctctctctgtttcacttgactatgcttgattatgaaatcttttttttttctttttttaatttaaagatctcaactggctttgttgtgattctacattcaggcaacactattctgtaaaatagtataaatgttccgatgagttgaacagaggagattggctttgtagacagaaaagggctgaagaaaacagaaataaaaaaatcttttccttttcatagtgagagctcagatgcaaatgtatggagtggggatggatgggaaatgccgtcttttgcaaacccttggaaacgctgtcaccctgtgggtctcacagccagtgtacagataacaccctcatctgtacacagaagacagaaggtggcaggggaaggaatgagcacaccccagaatgagtagcaagtttaatcaataaaatatgtatttctttttttattgttgtataagaagaaaagcagacagaactcaaaccctgaagctgattttgcaagtgaaaagcttagtaaagggggaaatgttatgtaactattttttcagtttagtgtggatggcttaagaaataatcattactgtgaggacactagtatttttcttggaaaaaaaagtttggcaaattttcctctttagattaatcttggttatagattattattatgcttgagtggtacctcttcagaagtagaaatctggcaaaaactggagtacaatgattgctctaggaataaattcacatatttaaatttaaaagcctggatatgtgcatcaattaatagctttatgaaacagggatgcttagtagattagctagctgagtattcagagagggccacagaagtctcaggttcacatgtattaaatctgctgaaatagaaacctaagagatcattttatttaggtttattttgtgtggctacatgttgaagaaacatgcaatagagatttagcttgaaccttgcgagactcacagtatcttacgaaagaagatagttaaaatggggaagatgagaggtttttaaaaatgtcacctctgtagaacgaaccagagttgttctcaatttataatgttgaatttgatgccaggcgtgatgttaggccaataacactgagtcattgagtgtttctcaggtatgtagagaaggcagcattgcacactaatcaggagagtttagaccagggcaggaatgcatgggcataaattctgtctttgtttcttttgagctagtgaccatgggcaagtttctgtgcctcagttttttcctttgtaaaatgggatgagtacttctagttattgaggatcgaattaatatctttgttaaatgcttgaaacagtgtgtgagttaatatatatgtaacctgatggcatagcataagcactgtgtgttagttgctgctatgtatggtgatgatgttgatgtacaatgggtatatgtaagtttcctgcatagttgaaagttaaaaatctagatgatgtttcacttattgacaaattacttattggccaattaagactattgcaggaaattgacagattgttgtctatgagtttgatctaaatttaaaaagcacatggtatctcagatacaatttttagaatacatgttataaaatttcatttattaaatatgtattgtgtatttcaattggttttttgaaaaatgaaaataattcatgctcattgaaaaatttaaaacagtacagaaatgtgcaaaaagcataagcattttttacacaaatgggaaatacctagtttttttttttctttttttccacataacatggatgtagaccttttttttttttttttgagacagaatctccctctgtcacccaggctggagtgcagtggcgcgatctcggctcactgcaacctccgcctcctgggttcaagcgattctcctgcctcagcctcctgagtagctgggactatgggcactcgccaccatgcccagctaatttttgtattttttaagtagagatggggtttcaccatgttggccaggctggtctcaaactcctgacctcaagtgatctgcccacctcggcctcccagagacctattttttaatgttgtacacactggcagcttgccacagatgtctaatattgagcaagtttatacactggcttgattattaactattagttggctatcagctatgtgcaaggaactgtgaacagacttggtttagttttcagtagaatctttgctagcaaaacgaataaacaggctttgccaatctgggtagaaatggaagatttcaaatgccagcaaaagaattttggtcctaatatggaagcttgaagttatgttcacccaaggacagggaaaccaaaaagcagattgcttgagaatgcggcatttctctaggaaatcagtttcaaaataaaatgaattttttgttttgttttgtttttgagacggagtctcgccctgtcgcccaagctggaatgcagtggtgcgatctcagctcactgcaatctccgcctctcaggttcaagcgattctcctgcctcagcctcccgagtagctgggattacaggcgtgtgccactatgcccagctaatttttatatttttagtagagacggggtttcactatgttggtcaggctggtctcaaactcttgacctcgtgatccgcctgcctcggcctcccaaagtgctgcgattacaggcgtgagccaccgcgcccagctgcagtaaagtgaatttgtgtaaccagccatgttatggctgttacatctttaaaactttatagtgatctgctgtttaattgaaattatatattttttttaaaaatcagcatatgttgctcaaaaataaaaggtttttagcttcaaaagcaggccaaggatatttgaaagccttgagtgtatgaaactggtgatactgtggttaaatgatgatgaacgcagggaaaaatcaagaagcagagtcccaaagaattcacatgggtttttgttaaccagctcatgtaattataattgtcctgtccaactaaagacaagaagacaagaagtgggttcacatacgaggatgtgtaatgacagaagccatatttgtgataaacatcctgattacagtagatacagtgaggagtgattaagatggttccagaagcaggagtggagggttcatgagcagggatgaggaataaataggacaaacattttggaaaagggaaaagatgaataagcctgttttgtaaattaatggatcctgatgaatgaagtgcagtgattccttaaggtcttattaatgatggaccccaaacagtgtttgaatctcttaatttccagatggttcctttttttcttcacaaagtcagaaggttttcttatgagaaatttgattcaacaagaataattgtcacttcttttgttttttggtgatttttttttttttttttttttttttttttgagactgagttttactgtgtcacccaggctggagtgcagtggcgtgtcttggcttactgcaacctctgcctcccgggttcaagcaattctcatgcctcagcctcctgaatagctgggtttacaggcatgtgccaccacgcctggctaatttttgtttttgttttttttttttttagtagagacagggtttcactacattggccagggtggtctcgaactcctgacttcaagtgatccacccacctaggcctcccaaagtgctgggataacaggtgtgagccactgcacctggccaattttttggtgattttgataggaatttttttttttgcctgatgctttttttgagagaatctaataatttgtctcttatttaataatttggctttcattagcttccagaaagccacatactgtcttcattgaaaaatgtaaggcatcctagatgatacagactgataaattacttttcagccataaaagatacttatgagaataagagatctgttgcataaagaaaagtcatttgtgttaagtgaagaaatgcattattactcttgctgctttgctaaatttcaaacattgaataactaatatattttgaccccctggagatattttacaggaagaaaaatgagaggtttaatcctactgttgagatagacttaacgtgttttagacctgcccctcatcccaagttactacaaactcatttgtttagtttttccttgtctgtgtgctcgttatttcacagtaaaattagtgaggcaacataaattttatttttaagagaaagtaaagaaaatggctttatccattaaaggtttattcatcttaaaaaaggacttgttatatctactcctactattggatgaattttcaaaagcatattgatactgtgtttggttttgtttgttttcgggacaagtcctcactctgtcacccaggctgaagtgcagtggtgtgatctgtagccgtggcctcctgggctgaagccatcttcctgccccagcctccagagtagctgggactacaggcatgtgccaccacatctgactaatttcttaaatgttttgtagagatggggtccccactatgttgcccaggctgatcttgaactcctgggctcaagcgatcctcctgcctcgaccttccaaagtgctagattacaggtgtgagctattgtgcctggccaatgttgtttttataaatatcattactcagttattttgtttataattgaattgataggctcatagaataaagatggataagcactgtttcttaactgtatttattgatttttttatctttcaaaaaaaaaatcctcatctacttcaaagattaagcctttaaaaccgatgcaaagtttttgaagtcttagcttaagtcttcagagactaacattaaaacccatcatatgaaaagtgatatgtagtagcaaatattctccatcctgatgctctcaattgcttattatggtttaacacaaatataattttgtcattacagtaaattagtttgaggatataactgaagagtacctaagaaactcccatagaaatgtgaaaatatgcagactaattattctaagaataattaatcatagatacttacatattaaattgattagcaatttaaaattaaagccaaatttctgtggaaattagcttattttcatacacaaagaaacctagattcttaggggtacaaccaagaaagggccactccttcatttcacaaatattttcgaggtccttgcccccaagagggtagacagaataaaaaggaggaaggaagtgacttggaaaaaattaagttgggtaaggaatataagagaatgctacgtagaaggatgtgtgttgtgaatgcaatagtttctgtagtattgtcaaagttctctgatcatttcagtatgtgaaggtaaacttagataactgggggaaggaactatatatttactacattgtaaaagaataattgtagacagaagatctactttgggtgattaaatgttgaaaacaagtggtgggagagagaagttagtgttgattgtgatcacacacttttctatacagtaatttgtttgatcactcatgataatgccttacattttgtatgtactaaataaatgagttctctagaaattctatgttgtggtgataaagaattacgttcagattgaagattcgaacagctgtgcaaccttctcaacatttaagaaactgcgaacaagcatagaaagaagattaaagccttttaaataagattcttttttttcagcctctttttggaacattttattgtgaaaaggtttcataaatactgtcaatacatcacgttcagtcatttgcaattgtatttcaaaaattcagttggcctgcaaaaagaaaaaatgcctcatttttgaaatatttcatccatgccctgattgattgggacactttcaatagagggtgcctagacataattttgtgtgaagaagttagtagagtttggaaagaaaatgtgtattggaattaaatttagtggcatgaaaatgaaaatttctctgtcattgtctttttttttggctccttttttggccattttacagctagtgtttagtgtgacaaggatcaaaattggccctttaaaaaaatatattgaattctattacctctgttatctaaaagaattgtatttttcaatttgaagagcttgaagccaatactactatataccattaacttgacaggaattgaaaatctaattgaggtcattatgattagccttgtatcttgctagtattttctcaatcttattttgaatgttttgtgtcaagtgttaaatcctcttataccacagaatccagaaaatttaaatgcaacagaagtaaaacgaatataaaaattctatggttgttgtggaggggcgttcttggctaacccatagggtgtttgaatgtaaaggcagcttacagaactgctgctagttgaattgtggagggtttcacttttaagagtacatttgagacaaaattgcaattttggaatcacttattcctgcttgttcagtgaaataggagaggggggaattcctgagggaagctgggagatttccaggtgatgatagagtagccatgtgagtatttggctgaaacagagtagaagccacctctgtctgttggacagaggtggccttaacactgagtatcaatcagcatggccattagagctgtccaggacaaacataatgaatgttgtggtggcagagagggtatacttaaatgaacaaaattggaggctgactttccttgtttcttggtagttcctttcttcgtatttgctatttggatatttcacttcacttttgtgagctagactcaaaggttaaatttatatcattgtgaattttctgggtcatattgtagggacacagatgggaagcatcccttcagtttattgagagtatttcttatgcgcatgtgtttttaattgtatttattgatttaataaatagccgatgagatgagaaaaaaatattagtgtcttgttgttgcagagaaaaagacattggatgcattcttagaatttattatcacatgcgaagttatttagatttacaaagcaatctgacatgttgacttcattgctcgtttgctcatttctatcagaggttgaacacaaagccaagcctaagcccgtgattcttctgtgtgcagatgagggggaaggtttaatgcagaatgtttagctgaatatttggattgtgcattccccttttatgtctctactgcaagttttctcagggcatttgtgattgacttctgtgatgttgacatttatttggagttagatgtttaaaaaattactaatttatggcctggtgcggtggcttacacctgtaatcccagcactttgggaggccaaggcgggtggatcacgaggtcaggagatccagtccatcctggctaacatggtgaaaccctgtctccactaaaaatacaacaaattaaccgggcgtggtgacaggcacctgtagtcccagctactcgggaggctgaggcaggagaatggtgtgaacctgggaggcagagcttgcagtgagccatcgtgccactgcactccagcctaggcaacagagcgagactccgtctcaaaaaaaaaaaaaatttactatcttattgtttctctcattttgaatttgtgaaattattattcattttatggacatactgcatggattctgtgtttcagttatgacaggagatctagaatctgggtggggctgtgagtaaatagaaaggtaactcagtctgtgccttgaggaattccgcagtccagtggaggaagaaagagacggagaaataattaggtacagtgtgccaaaggctataatagaggaggtacaaactcttcccagagaaggcaggcagaatttgaactaggtttcaaggatgtgtgaaggtgaactggggtggggagggcttcccagacagaaaaaacagcgagggtgtagagtttcaaagggggaagcccaggggtataataagtgaaggagacagtgtgaaattataaattttggatgcccttaatgagtttgaacttcattttcttagaaatggagtacttttaaatgttcctaaaatggggacgaggcattgatattcatggttcagttaggtttaggagcttttgtagaagtccttttcaaggtctgcttaatctcatgggccagatagtgacacctcgatgcaagggagcatgtaaatgtgctctattagctgggagcattgctatcagaaattacatttccggctctcttcttaagggtaaaggagaggtaggatattgagtggcaactggcattctgggatgtagaagaaatacagtaccataaagggatagaggaaaatgggtagacttaacgttctgaaccaaagctaagattctccgtgagcgattagagtaggcttttgggatttgcttaccttctcttatctgctagccagccacacaggaagcacatctttgtggagtgacagaggaggaggtaggaaatgctttctcatttttatggtagaaacatccaagagctgagccttcattctggctgagagaactctagatggttcagacttgcattcctgggaaggccttccagctagagtgatggaacaaagcaatgatttctgtggccctgtgtggacagcagtggcagtcagtttactctccctgttggttaactgtctttcgtttgatctagagacttcctcaaaacaattttgttgtgcttgttctttgaaagcaacagcagacaaaacaagctttgaggtttttagaaaagagcttgacactgagcacctcttttgagctagatctgtctgtcatgctgaacctgttttctgtggctgcgtagcttttcaaatctgtttatgcttgctggtgttattgaaacagaatgggaagatctatgcaaaaaggaacattgatcttaataaatttatgtcagtaagaatgggactgccattttaaaatttattttaattccttacctattttcttgttcaattattctaaaagtgattaaatgaagatacgtcacagaaagtatgctttgaaatcaagatgtggggaaaacctgtagttctgagtaggcctgatagaatcatcattgttagagtatttggaggttttgtagtagggattttgtcttcacttaaatatttagttgaaatatgttccaatagtttgacacattacagaatctgtctgaaagaaatgtctaaaatatgattcctcagaagctgctcttggttttactttctgctgttggttttactttctaacatttcattttgatcccgcagttttaagagtaatcaaaaaggccgggcacggtggctcacacctgtaatcccagcacttcgggagactgaggtgggtggatcacttgaggtcaggagttcaaggccagcctggccaacatggtgaaaccccgtctctacaaaaaatacaaaaatcagccgagcgtggtggtgcatgcctgtagtctcagttactcgggaggctgagacaggagaatcccttgaacccaggaggcggaggttgcagtgagccgagatcataccactgcattccagcctgggcaacagagccagactctgtctcaaaaaaaaagagtaatcaaaaagctacattatttaaatcttggcatgtctttaaaaaatgttaaactgtcaggaaaattatcacttctggataccaccttcagaaaaacacatgaaaatttgtgcatgtctcaaatagttgttaatttatgaaaaattagaaagagtgtttgaatgtatatttctgtcatattatattgctcatatttttaaattatactttttttcacccgtgaagcccatatagttaagtttgaaaattttaattatattagaatttgaaaattaaataaatctcctttaattcatgcataattttctaatagtcatatagtttgtattatataatttgagaaacttggttctaaaaaaattgtctgccaaagaatgtatatttctgaattctgttctgctttcatacatctgaaaatatttgagctatcataactggctatgcttcaaacccagtctgaaatgggtgacctttgctggctttggattgcagagctgggggctgttgtttgctttatctgatttaaaatagtcagtagtttattttgcaggcagttagatgtatacctttgcataaaatcattgaactgaaaaggttggcactccaagaatacgttgtgagaaaagagaacttgagtactcactctcgactcacctgaatcttattaatattttattgattaatatctgttgtatttttaagtaaataagctctctagaaactatctctgcttctttgttcatttaaaatatattaaacaaattgatacagattgcaaaaattagttgcaacgttcctagttagatatcaatgaaataaaaatggtctattcatacgagttcattttagttattcctactaatatcaaatgtgttttaaaaaatgggagattataatctttttatgaagtaagataaattattactttgtatatttaattcaaagaaaacaaaaaggccacaagtgcctgcataaaggcacatccacttaggattattgttaaggcctacagttgataattaggattcaggcatagcataaatgaagtggtatctttttttttttttttttttttgagacgaagtctcgctctgttgtccaggctggagtgcagtggcacggtctcggctcactgcaagctctgcctccctcctgggttcacgccattctcctccctcagcctcccgagtagctgggactacaggcttccgccaccactcccagctacgtttttttgtatttttggtagagacagggtttcaccatgttagccaggatggtcttgatctcctgacctcatgatccacccgtctcggcctcccaaagtgctgggattacaggcatgagccaccgcgcccagccagatatcaattatttttagacccaatgatatttgctgttgatttattgttggtgcacaaaataagaaaacaaaagcatggttttaaaacagccctttacacatttaatatggaaatggtaacctacaggtctgtattccatacagattcctgggctcattttatctgtgaattcctctgggcgtcatgcatgcccaggactgactttaaagcagaattatccagtagaggtataataggaccgttagatctaatttaaagttttcaagtagccacataaaaaaataagcaggcgaaattaattttagtctgtcactaaattcaaaatgttatttcaacagggggtcaatataaaagctatttatgaaatacattattttttcatattatgtcttcaaaatgttcacatttcacatatttattttttattttattattactatttttttgagacggagtctcactcagtcggttgcccaggctagagtgcaatctagcttgctcattgcaatcttggctcattgcaacctccacctcctgggttcaagcagttttcctgcctcagcctcctgagtagctgggattacaggcgtgtgccatcacacccagctaatttttttatttttggtagggatgagatttcaccatgttggccaggctggtcttgaactcctgacctcaagtgacttgccgctttggcctcccaaagtgccgggattacagttgtgagccaccgcacctgattacatatttcacatattttaattcagaccagctgcatgtcaagtacttagtagccacagatggctagtggttactgtattggacagtgcagctctaggagagtctcttcaacctgcagctgtctaggaagagaatcatagtttctggaacaggtagaatctataagacctcctttttaagcttctccactttacagatgaagaaagtaatatctggagatgttgagttgttcaaaatcacccacattttaaggatcaagagcccagtccctgttctctaacttctaatctctttcttcatcactttttctgcttcatgttgctgcatcccctttagttactaaggtactaacgttaggttgttgctatcagttaaatattaagccaggagctttaagacaatctggcccacttgaaggcatggcctgatttggacaaaacttgtggggtaggatgaatagagttaccaggcatatcttcaacctctctgtggactagtattatacatatatgagatgatgtagggtccagtgatcagttcatctttttctattgtgagcactgttggaataggaatggggggaccttttgggacccaggatatgtgattctgaaccctgaaatgtcagatgcccactaaaaggaaggggagagatggacctgtcattaccttacacattttattgtctgtatgggtatgtaaacatgtacagattataaggaattgcacttcatttctgggcttctggaaacacaggtattaagatttcatttacctccccttgttttggaaggcttattgtgtgtgtgcccatagttcttacccagttacacttaaagtatgatactttttgacagcttaagcctattgcattcctggcatgtaaaatagttattttcagaatgtaagcaaatgtggaaagcttactgcctgacatggagggttggagaagtgggattggtgttcttttgttgtaaactcatttttgtgaaatatttgctttacaacgtgaagcatgcatgatggatgaacttttagaattgaaagttatttttcatttcattcctgaaatatttaccagcatggatgttgactgagtgctttgaagagtttgcttagtcatataacttaggttttatgattttagatttaattaaacttaaagttttcctgtttgatcctcaggacttctcatctgtggcaaggctttactcacaaaggaaatatcaaccttgaagttaagcatgccctgtgtttctttatattctgatgaaaacgattgaagtttgccagtgctgtgtctgggacaatgcttagaggattcatggcttgtaggaatgagttaaaagtacaaggatattggctggcatggtgactgtcgcctgtagtcccaaaactttgagagtctgaggtcagaggattgcttgagctcaggagtttgagacaagcctgggcagcataaggagatcccatctctatgttttttaaaaaagtgaaaaacaacaacaacaacaaggtacaggggtatctgcgtttccttaggcagctgtcttatatacctttaaccttaaaaaaatccaccatttttaaaacagtgttttctgttgtttttcttagtaaatataaacaataggaactgaagtttagggcttaaaatttttgagagaataatttttatttcagtagcttttggggtacaagtggtttcttgttacttagttgaattacgtagtggtgaattctgagattttagtgcacttaagtagggtaccttgtacctaatgtctagtttttcttttaatccctagtcccctattaccctcctcctcgtgagtctctaaagtccaatatgtccctctgtgtgcctttgcttattcctaacttagttcccacttataagagagaacatacggtttttggttttccaattcctgaattactttacttagaataatggcctccagctctatccaagttgttgcaaaagacattattttgttccttgtaatggctgagtagtagtccctgatatatatatgccacatcttctttatcctctcattagtcagtggccacttaggttggttctgcatctttgcatttgtgaattgtggtcctgtaaacatatgtgtacaagtgtctttttcatacaatgacttcttttcctccgggtagatacccagtattaagattgctggatcaaatggtagatctacttttaactctttaggaaatctccataatgttttccatagaggtggtactagtttacattctgagagaataatttttgtaaaattatgtttaagctagatttggaattgggaaagaattacattctttataggaagcttttgaaaaatatatttaaaaatatataaaaatatgcataatcctaccacccacaaatgtctgtattattatgtcatttctaaaccatttttgagattatgctatagattacgttttagatcctacattttatttcttaacattaaatctcatactattttaagttctttgtacatgtaatgtttactgaatgggtaaatctgtttagggaaactggagctatgtagttgtggacttgtgcttttgttttgttttgttttgtttgtttgtacatttgctttttagaaatgtctattcagatccttggcccatttttttttttttttttttttttgagatggagtcttgctctgtcgcccagactggagtgcagtggcgcgatctcggctcactgcaagctccgcctcccgggttcacgccattctcccgcctcagcctcccgagtagctgggactacgggcgcccgccaccacgcccggctaattttgtttttgttttgtatttttagtagagatagggtttcaccatgttggccaggatggtcttgatctcctgacctcgtgatccccccgcctcggcctcccaaagtgctgggattacaggcgtgagccaccgtgcccagacagacatgtgcttttttatttggcatttctagcctgaacataggctggaagtagtgacttagagagggattgtttgccaaatatcaggtaatattttaattatttattatttattgtaatgctgtgaatcaggagtccctaacccctgggccatggactggtaccggtctgtggcgtgttaggagctttgctgcacagcagtaggtgagcaatgggtgagtgagtgttgctgcctgagccctgcctcttgtcacatcagcagggcattagatgctcataggagcgcaaaccctattgtgaaccgcatgtaagaaagtgagagctgcgttgcacactccttattagaatctaatgcctgatgatctgaggtggagcagtttcatcccgaaaccaaaccacaaaattgtctttcatcaaaccattccctggtgccagaaaggctggggaccactgctataaattgctgctgtcaagtagtgttacgcatggtggtctttaacataaaaaaaaaaggtaatgaacgtacaccacacagattagcaaaaataaggaaaggctgatctagtagttcaaacaagcaatcctcttatttaatggttctgtgattgctcgtgtaggcagaagcttaactgtaagttgttgcatttgacaggcaaatgtagctggagctggaatgtagatattagtgaaattgtgatttcagtttactggagccattcagtgggagcatgaagtgggttacatgattacacggatataaataaagcgtcctccttgccacttcactgctgttaaagtctctcctgatgttatgtggtgaaaaacaagtcaaaaacattaattctgtcaagtttccaaagatataagaatctttgaccagaaaagagacggtatttatcttcaaatttaacaaattgtgatgaaatgctgctgttacagaacctagtgtaaggtcgtggagtccattcagccagacacatgtaattttgattattaactgccgtttctgtggtcagtcggccagttttatatatttcacattataggtatttggagcaaagacagtgttgtttattgtttactttaaaaaaatacaatactgtaactacataatgagtaaatgttgatactgttgaaaactaataaaaacaaattcttacactatcaacatcacagaaattctaattgtaagaaaatattgatataatatggaaatccgttcatttatttggtgcattaattgaacaccaacactatgccaagcattgggatacaaccatgaaagaggccagcttcctgatctcacagagcttgtactttgttgggtggggcagagagcaaatcagtcaatctgtctgtctgtctgtctatctatctgtctatctatctgtctatctagatgtcaatcagtatactctgtgccacttggtggtcagtgctatgaagaaaaattaagccagtgaggagctggatagagacacagtctggaagggtatgaaggggatcagaatatgctacccccaaatatgccatttcagcaaagtactaatttgagctgaagacaatcgagaaatagcagacccaggacaagctttaccccctttttataaaaattttgctgtgtgaaggtatcctccttcccctctccatccctggagagaccactagaggtggcaccatcgcctgcagaaacaaaccttattgaaataacccttatcttctattagtttcccccatatatttaccttaccacacttcccctggaagccctaatcccctctcctttgtcttgtgacttctccacagtttattgctctttgttaaaatggtgtgtatgctctcaggcctaactgcttcttttgggtttttgcttttctgtggagctccctcctctcccctccctcatgtaaaaataataacattaaataaaatttgtgttttttcccctgcgaatctgtctcgtcagtttaattggcaaggcctcatgtgctgaacctaacagggtagagaaaaaaggtttttttccccttttctacaagtattaaacctggagagaacaatacagtgtaaaggctgtgaggtgggagcatgctggggtgttggaagaagcacatgagcttacaaacattccatcaatttgcattcattccaaaaattgtatgcaatttttcagtgacgattcccattgatcaatcatttataaaaactaatggtgagggtcttccatactcagtttactcccttcttggaaaagaatgtacattttaatcaagatgatttcatgaaagacattctgtactccaaacatttaaaagagcgtttagagtatacagcaattcatcttttcttctgtattttaaaatttaagacagggagaattattgtattatacttagttcagatttggtggtggttttgttttttggttccagtgaaaagaaattgcatcagtaacctggcggtcaaccgtgccatattgtttgtgatttattagtctggaaaaaataactgtatttctggcatatgtaaaaatagtttgctgagaggcctccttggttgtggcaatagtaatactaattaccaggtactgtatgtagctcattctatgaaccaggccttgttgaaaagtgctttcacttaattttttcttttcagcagcctgtgaggtacctactgttatccccagctgggagggagctggccagtggactgggtttaaactatgttttcattgtctttactcttaaccacttatcttctctgcctccagcaaaataagtcaaagagttcagccagtgtttcttcttggactaagcagtcagcctcctaagtaagcaagccttggaatgcaattgattggtaagatactaaagtaatcagtaaggccctcagttcctggctgccagcttctttcaccctctcctgcaggaagttctgaatgctgatatctctacttggtgtcttctctccccctcccaattccattatttccctttttctcaatcccaagtgaaggaagttctgagtgtggatgttggagtcattcagaccttggatctgagtcacaactctttcaatttactagaaatatgactgcaagaaaatgatgtaagcttccctaaaccaatttccacatctacaaagtatctaaatagattgcttaggagaaaaattgaattaaattgaataaagtgcaaagcacagaacatggccaggagtaggccctggatgaatgagggaaaaatggttctgatttttatttttgagcctctttgtaacatttgttggccccttcagaataatccttagagttcatatcagccacccttcatccctcctgggatgggccaggggagaggcccagttgcctgtgacactgcttcgtttcacatttcactgctttagcatctcaacatttcattgataacatttttgatgcctgaaaacagaataacttatttgtaattctacatacattttgtttgtgatcaagttgttagagtttgaaatgagcctcatttccttgggttttgtccctccccatctgaccttcctcttctcagtgaaccctgaagaaaaaacactagcaaaggaatctcaagaatgttggttcgggacacagctctctccatctactctcctgccctagtcctgcccctccttgtgttttcagcggtgaccaggcactggtgacagccttggctgcttggaccagctggaggtagctgcaaaatgcctgcctgctagctttgaaaaatctctgccaacctcattgaaataattgtttaccacatatcagaggggactgggaagtgggtaattgagagatctttttgaaggggtttgtggcttctccacttgcagaggcttcctgaaatggtgggtaatgctcatgcctcagggagaatcaatatccttctcctaaaacctgctcacacgtagctctaagtattagacatgcatttttgttaacattttatcagtgcatttttctacctgtgtcatttggaccttagattcgggagaaaatcactgtgtatctttggtggtttcaggtggctcttaaatttcattaattcacaaaatctgaattgaatggaatagtctgttttgggaggtttttttgggggggttggggagggattggatttttcagtccttccaagagacttcaggttttttttttgatgttctgattagcccggtgtgtgtaaggccctatcaggtgttcgcctgtgtgatcctatcacacccacatcctgtagctgcatccaagtgctttgaggccgacttaatggggattaacttaacagttgctctgtgggaacagatgctctttgccgcttatttctaataaattgattgagccatttaaaagattttttttttcttttaagttacatcttcttaagaaactgtagacaataaagcaaaactaaaatacttgggtctaaaattagtgtattatatttaaaacactgggcttcagactgattatatcatgctcttttactgactttctagtcagatgcttatttataaaaataaagcttatataaagggcagcattcaaatgttacaccagtcggttttagcagtttgaccttccacagtagctaaatattttttacactgagagaagaattctttaacattatatgctatcagcatgtcaagtgaattctgagcttgcatgcaacagatgagaccctaggtggaaacataaaaacataccagtgtgaaagagaaaagcaggctctctgtctttgggaaggagttctgcagggaggggtgtttataagtgtagtagatacttaggaaaattaatacaattattataaaagtcatctgggaaaaaccattaggtaagaatagccaataaaaaaccagaagcaaaatgtaaagatatagaaattaaaactgcacatcccatgcatagataggtcaatggggcaaactggaagtctagaaataaagttgtgcatatattggaaattagtgcaagataaaagtgtctttttacatcagaaaggggaaagatggattatttagttaatggtgttgggttatctgactgtacatagaaggaaggtgggtaattatttacccagtaccaatactggattacctagtattatgtacccagtacagtttgtcagcaacaaaaggcaaacttttttattccatgaagtgttcttacaaatcagtaagaaatactaaatatgaacatcttcagagaaaaatgaacatttttgaaaacttattatgaaaagaattaaacatacacaagagagaatagtgcgctgaatgctcagcaatgatcagctctcacccagtcttgttttatctgtattcccctttctcaacctgctcaattctcttttccctcactgggttattttgaaataatttcaattctataattttatgtataaatatttcagtgtggatgtctaacagaatctctattagacgtggacaaaaaaggcaaagaattttatagtacacaggaaaaaatacacagccaataaacctatgaagatatgctcaatctcatagtcgtcagggaaatgcaaagtaaaacagtgatataacattgttttttaaaaccctgatgggcaaagactaaaaaggcttgccagattggcattttcatctactgtcaattgataacagatatttctttgcttggagtacagtggcacagtctggactcactgcaacctctgcctcccaggttcaagtgattctcctgcctcagcctcccgagtacctgggattacaggtgtgagccaccacgcctggctcattttttgtatttttagtagaagcagggtttcaccatgttggccaggctggtctcgaattcctgacctcaagtgatctgcccactgcaggcatgagccgctgcatgcagctggtacagaaattttttagatcagtcatttagaattttatgtacatatcccttgatctaggaattctagaaactaattagttcatagtatattgtataaatgcgcacagatgaggatattatgagagcattatttgtatcaactaagcaagcctttaaaaaactcttatacagtagaatattatgctgatacattaaaagtgggcataaccatactgatgtatagaaatatctaaaatcataccgatataagtgaaaacattcagaatgcaggcataatcacagattaaacagtaatttatataaaaaacagaaaatttatatgtgtattatgtcagtagcagattcaagtgaatctgacaaaatctgactctgggcaatgagaacattggaatggaggagaaggtagtacatatttactttgtatattatcaccttttgtactatttgagtctttttaactgtacgcagatactttagagcaggggtccccaacacccagccatggacaggtactggtccatggcctgctaggaaccgggccacacagcaggaggtgagtggcaggcaggtgagccagtgagcattactgcctgagtgctgcttcctggcagtagattctcacaggagcacaaaacctattgtgaactaaacatgggagggatccaggttgcctggtccagtccttgtgagaatctaactaatgtctgatgatctgaggtggaagagtttcatcccaaaaccatcccatcccatccagtctcatgccatcccacccccaacaccccatggataaatggtcttccacaaaaccagtccctggtgccaaaaaggttagagatcactgccttagaggctgctccctcttggcacatcttgaatgtaggactccttggttctgccattcctggtaggtagtcagccagcttttgatagttctccccagagacttcatcccacaggcaagccatcccattccacgtaaaacatctctaatgttaggaaggcacgtattttgatgtgatatctagaatcctcccagctgttcttcagaggaacattacttttataaagttgaaaagaacgttttattgtattataaaactaggtcatttcagtgaatttcatctattttcatgggtaactgattcttatatcaaaacttgcttttgaaagtactggaagcataaattattacttcaggcccatttgctttactttgttcagcacattgaacatcaaggagcaactccctcgatctaaaatttctagcattggtgcttgtaatatcatttttcaagttgacattaatgctatctttggaattctcatggtaagtcagaagaaagcagtttagtggaactgttctttctcccactgaattgtatactgagatctgttatattttctgcattttaacccagaaagttgttcaagagaattgaccatgataagacatctgtagcttattttgtatttttttaatggaaaattgtaactgacttttaaatttaagattgagtgtagcctttcccaaaccaatagctaatgtttttataactatttagtgtaggagattataataaaatccacattgcttaagatataaaatgtttgtgcagtaataggctgtataaaaacagtaaattgagattgtatcaggaataatgtattataaaccatatatgaaaccaggtactaacttggtattctgcatagctttatcagaaaggcagagcaaatactatctcaaaatgaagtataaacaaaatgaggttcagtgagtgatgtggtttggctccatccccacctggatctcatcttgaattgtagtccccataatccccatgtgtagtgggagggaccaggtggagataactgaatcatagaggcggtttcccccatcctgttctggtaatagtgagttagttctcacgagaactgatcactttataagggacttttccccccttttgcttggcacttcttcttcctgccaccatgtgaagaaggacgtgtttgcctccccgtctaccctaattgtaaggttcctgaggcctccccagccatgctgaactgtgagtcagttcaacctgtttcttttataaattactgagtcttggatatgtcttcattagcagcgtgagatcagattaatacagggaggctacataatttgacccaagtagcaataaacaataggggtgaggttgaaatccaggcccctggtacttatggccttaagctaagtgaaataagccagacacagaaaaacaaatactgcatgatttcatttatatgtggaacctaaaacactcaaactcatggaaacaagagtagaagggtggtgttaccagggtttggatgtgggggaagtgaggcgatgttggtcaaagggtgcaaacttgcagttatgagattaatacctaatgtacagcctagtgactagttaataatagtgaattgtacacttgaaaacgtctgcgagagtaaatgttaaatattcttaccacacagaacaaaaaaagtaactctgaggtgatggatatgttaattagcttgattgtgataatcatttcacagtgtatacatatatcaaaacatcacgttgtatacattgaatatacataatttttgtcaattatacttcagtaaagctagggaagaataaaagaagtgacctaaccaggacacctatctgtagctctatggtaaagccaaaagggataataacttttgattatcaaaacttcatcatcattattattttttaagactgggtcttgctatgttacttaggctggtctcaaactcctaggctaagtgatcctcctgccttggcctcccgacatattaggattataggcatgagccatcacacccagccagttttgaaggtatctttattacatttttttgtttaaatatttaatagtaagtgtttaacttgaagcatttttttctgccttaaaattgattttcccactcattttatggatcaaaactattatcagattttaattcccactccaccacattgtttataaaagttgacaattatggaaagtaaagtaatactgaatttttctaatgcctatctttgacatggaataaagattataaaatttcttataacttgaatgagtttttaaaaattggacatctttttataaaaatctagcattgaccatttcaacataagttttacttatctctgaaatacaggtagtacctatttttattaattttcttaagtgatgctgagtgacactatttttgttttttttcactttttctttactttttttttgagacaggatctcagtctgctgccaaggctagagtgcagtggtgtggtcttagctcactgcagcctcggcttcctgggctcaagcgatgctgccacctcagcctcctgagtagctgggactacaggtttgcaccaccaggcccagcagttttaaagattttttgtagagatggggtcttgctgtgttgcccagactggtcttgaactcctggcctcaggcgagcctccgacctctatctcccaaagtgctggaattatagacatcaaccaccgtgcctggccccagtgacactgtcttaattttgaatagggaagtatctaatggtattaaaatggtctggcagagaaggggatatgaggcttggtgaaaataagcacaggatgcaccatctttgagtaagtgttagtttctgcagtgagccagcagcaacattcttagcagagcctagaaagatcgagtgagggctgtgtggtggtgcagcctcttaagtctctctggttccacaacatgctcagattggtggctttgatattttctccatccaggacgcattgtgctaagcttagggaaggtccagtggatatttaccaagcctcttatactgccccgcatgttgccatgagacagcagcgttatcaccttaaatggtgcaaatactccttgtgcataccctacccctgagatctaacatctggattctggatactgtttcctattcttccatcttgctgcatggttcccaggttatgtatatagtgtggctaggcaccacacatggccctggctccttgcagccatacagaggtgacctaactggatgtaattgggtatgtaccgggtgttggctacctgtgcaggttgagggccttccacaggtctagcaaagcaattcattgcctttctgaatttttgaatgcttcatttgtgaaacccttgatgtaataactgttgatattatttctttttgaaaactccccttactcttccctgtttcttcatttgtaaactggaaccgatagaaaagtaccaaacttagggttgttgtgaggcgtaaaagaaataatacagcccagagaacatagtatatactcagcaagtatttattaatatgactactaagccagcattggtgattgattggctcatagtgtcttctatttgccagatgttttcagaggctctgttcatgttcatacccatgtttgtaaatgacagaatgtaaatttcttaatcctctgtcttctcctttagcatcagctcttgtccccaaagtaaaagaactcagtcatccagaacccagttttgtagatctatttttcaaaattgggcagttaatagaaaattaaaagcagtctagggaaaagcctttcctttgggtttgttgctttcttttctgtcataataagactgtgcccaaactgtagggaaaaatcaagaaactgtaaaatacatcatcagggtgtttatagtaaatgtaaaacgttaagtaacatttgagttaatctgtgcttgtacaaacctcagaagcttaaataatgaaccaatgacatataatttagaaagttttcattagactctttgcgttggtatttgcaatatcagatttgcatgtcatcattattagccttcctctattttgagtgttgactaggtgccaggcgtcatgttgagaaatttatgtgcttatttaattctcacactgactccatgagatagatactccattttacagatgaggaccccacatcataaccttttggccagaattacagttagtgttagaatttaaacctatgcagtctcattccaaatcctctgtctttactcctccagaatgctccattaaatgaattgtttcttataatccggttgttttaacgttggaaaagaacttgagaacatttagcccaaccaccctatgaagtttggcagtacttcttgccattctttcaatagataatttatttgagtttaagggagagtctatgaattaacactagtaccaaaactcccatgagaaaataatgtagacagcttttgttaaaaaagcagaatttttaaaggtgttcattcagttatcttcttgcctaacaagttcctgtgttgtgatagactttgaatttgttaaatatgaattggcttcctgattctagctgttttgccagaggcctgatttagagaagggattaaaccactggtcaaccttggatggaatttgggccagcagttccttctccacagcccctgacacttggctttgtgccaagaaaatcctacaaaaggaaattgatttactctacccaagacagagttccggaggctttggttgtccattgttagcttagaagttggcgcagtgtgcgtgtgatccacgcctaaatagcacagccttgctgtgcgtggtagaagttgggttagtgttgacatgctgttgactcaccctcccgaggatggaagctctggcctgggtcaagttgtggtcactgcagttaacagtttgttgatctcagggagtattccacagttgctgatgtaattgacaatgattggagccagctcttccccagattcaaatggaccaattagaggacttgttggttctgtttatcaactatgtaagtgagtactgtgaagttggcattgtttttagtctgtatttgggtaagatgaaactctgttctcagacagtaatatctttcaaaagtacaatgttacttattgtgaccaaagtagggatgaagtttgcaaattatttggtgtaatgatttaatttggccatccatgcagtgcagttctctaccagtgtgattgttctctttgtaaaatactcttactttgccagaaaattgtttgtttgtttgtttgtttgtttgtttgtttgtttgttttgagacggagtctcgctctgttgccaggctggagtgcagtggcccgatattggctcactgcatccttcaagcaattctcctccctcagcctcctgagtagctgggactacaggtgtgtgccaccacgtccagctaatttctgtatttttaatagagacgaggtttcatcatgttggccaggatggtcttgatctcttgacctcgtgatctgcctgcctcggcctcctaaagtgctgggatacaggcgtgagccactgagccctgttgaaaattcttattaataagatgtttctcatagaatgtttcaaaaaattgtgactggtttcaaaatcagatgatttgcaagaattagccatagtataaacacatagttctcaaaccgttttctgggagtgggcccagagatctatttaacaaaaccttgagtagagtctggtgcaagttaaaattggagaaccactaatgtaaccttaccttatctgtggaccacattttgagctttggaagaaataaccctttctatccttcacaaggtaacagatgatttttttgcacaattatttgataatgagcttatatttgagattaaggtatgcacacgataatgtacattctcactctaggtctggggaccttgattctttgactcttctgtccttttctctccagttacttggttttgtgcattaacaaacttttcaatttacttatttttttttacttatttacttatttctcatcccttacgtaatgttgcatcattgttttttgtagcctctgcagttcaagatactaatcacccctttctaccacattaaaatacagactctacctaaaatcatgtatgggagtaacttgatatatacgaaagtgtaaccgtgtcacaattccccgccccaccccgccagtctacataaaactgcaaacactttattgcttaccaagaaagtagacaataatatcgaagaaagccctccttttcctcttctttgaccaacaagggagcagttcctgacaaatgtcagtttgctttttgagttccttaggtttctgtgttgtgtttgcaatggataaatattgagtaacaggtactgactgtattgtatacattgaaaactatccaccaacagaatatttgcaggaggattttgttttgttttgttttgttttgttttgttttgttttctgagacaggctatctctctgtcacccaggatggagtgccatggagtcatcatggcttactgtagccttaacctccttgtctcaagcgatcctcccgcctcagcctcctaagtagctaggactacaggagaggaacaccatgcctggctaatttttttttttttttttgtagagacagagtttcgctgtgttggccaggctagtgttgaactcctgggctcaagaaatctcccaaagtgctgggattataggcatcagccactgtgcctggcttgagaatgacattctataagtagtttcagtcccttagtttaatcccatattttgatcctataacatgtacaatatttgtgtatagtatatgatctgccaactctctaagaagattttaaaacttattatgttaaatttcagacatatacatcatccagcttcaaaaattgaccacattttgctgttcttgtttcagcacctccccctgccccattttcttttctgaagcattttaaaataattctcaggtatcatatcattttacttctgttcataggtttctgaaaggatttgatgcagaatgttattattaaaccagtatacagagagaaaggccactggatattagtacatgttttggtttcagacggtccttttaagagtatattaaatcacataaggattttctgagtacccattagaaccacaaaaaatacctatgatacccttcttactgcagtagaagatgagtttcctagggtagccctttgttgatggaacaaacatgtattttgtttcatcaggaaaatcattggaacagccatgactcagatccactaaatgaaggaacaaaaataggacctgcctcacctcctgatttttttttaaatctctaggatgagtaaccagaatatttttatgttgtgctaagtaggtttgtttgtttgttttttactctgacttatattatttgaattgtagaaatatattgtttttacttttttctttaaaattctatctggagtttctaaatgagagattgtagctcctaaaacctttcttagttttggtgtcttgctttctgttcttagcgtctgtggtcatttctaactcccagtgaggaaagagctctctggtcttgtttctttgttaaatgaaggagcaaacctccgtctcgttgatccactcccaacccacttgttttgtaacaatgaaagttatctcatacttaaaagacaacttgaaattataacacacctgtaacaaagtaaagggtatgggtttttacttaggtttaaaaaaagggcagtaacccttttcataaaaaagcaaaatttagatgggatagaacccccgtttatagaaaagattttaaaatctcatttgctctcattgaaaccttaaccttctctcaaatactggcgcacctctgaggaacttcaaatacggtttgaaaactaatggtttaaggagggccaggcgcagtggctcatgcctgtaaccccagcactttgggaggccgaggtgggcggatcacttgatgttagcctgggcaacatggccaaatgctgtctctactgaaaataggaaaaattagctgggtgtggtggcgcatgcctgtagtcccagctactcaggaggcggaggtggaggcgggaggatctcttgaacccaggaggcataggtgcagtgagcagagatggatctcttgaacccaggaggcataggtgcagtgagcagagatcgcgccactgcactccagcctgggtgacattgagactgtctcaaaaaggaagacgaatggtctaaggaaactagtttgtggtttctcagcggagaatgacattctagtttctacagatctggcaacagaagacaggcacataaactggcctgctttggagtcagggccaagacttaaatccagatttaaaaccagctttttttttttcttcttctaaaacaaccaacctgtgttttaggtccagtgtctgccttgtaagttgctcaaagctcagatacaaggaagtaatcagcacacatttttgtgataacattcctgaaaagaaaaagatgaggtggactaaggtaaatacactgctccttaaaaatccatatttttagattatttataaatcaaatgggcatggttaccaaagatgaattctagaggtgtaaaactccagtcttatacctcaaatttcagttttccttagggagcaaaacacttccatgatcttactgaggacctaaaaaagcctgtacatattttaaaaatagcactccctagataaagcctgatggatccagggtacagtagaatcatgaaattgcctgtttctttttaaaagatgtatatgattgctcggtggctgtatattgtccatcgtgtgcgtgcctgtgtggtatgttggttctttcagagaggcagtggcgtgcagagtgagaggatcacagatgtgtatgtgacaaaactatttcttttctttcttttcttttctttctttctttctttctttctttctttcttttctttcttttcttttcttttcttttcttttttcttttttgagacagagtctcactctgttgcccaggctggagtgcaatggtgtgatcttggcttactgcaacctctgcctcctgggttcaagcgattctcctgcctcagcctcctgagtagctggattacaggtgtgcaccacgatgcctggctaatttttgtatttttagtagaggcagggtttcactgtgttgttcaggctggtctcgaacttctgacctcgtgatccgcctgcctcggccacccagcgtgctgggattacaggtgtgagccaccgtgcctggctgacaaaactatttctaaaacacaagtccagatattcctaccaagggctctctggggcttcgttttgatttatatgcaaaacactcctaatgtggtgacattggggagataaagatctgggatgatgagagagaaaggcaggtaggacacatgcccttccagtaactttcccagctagggcttgcatttaacctctgatggaggcctcaccatccaggcagatgtacttgcttaggaatgagtttgagataataaggctaaatgtgctgccttctgtatataatttgcatttgtcctaatgtacgactaaggaaatgaaaaatcaaagtttgagtgactaaaataaaagaggtctgtggagtaattggattgaatttgcaccaagtcaaggagaaaacttctgtattttgtatgttttgtcatggttctatgattacttgttagaaagtgatataaaattcaataacttagtttgatatgaacttggctatctttaagttatagaagtcgtgcatataatgtggctgttttcaacccccataccctttctgagtggttggagatgtcttgaatttcgaagtgagaaggtctggtgctgttacatagataatcatgttagccagctttaccttctgataagctctcaatttaagaaagtacttctaatcctggctttatctttggcttgctatcttattatgcacagagcataattgtaagaagggaataatatctcttgctgtctattcactaagaatagtgtgaggacagggctcttaaaaacatgaagagatgggcactattgtatagatatagagatttgatgaaatgttaaaatgttggatgattttaaatgacaagtggagtggtgagaagtttatttttaaccttatgtggataccttggatatttagaaacatcgaagttttaaggaagaacaaatatcttgactccaagaaaatggtcatgtgatactgtggcatctatttggtcttcctgatgtatatgtttcctgacatttagctcctaaaatccttggaatctccagtgctaagaaggtcttatatgctaatgagatgactggtggctgggtaacctaccatgtgattagagggttaggactttcagtcaccctccccaacctccaggagctgaagtttgagttgataaactaatgatcaatgatacctacataatgaagctttcttaacaaccctgaaggaccgcgttctgggaacttccagatagctgaacacatggaggttcctggagggttggatgtcaggaaagggcatggaatctcgttttctcttcagccgcacctcaccccgtgcatctcttccatctggctgttcatctgtgtgtcctttgtaatatcctttaaaataaatgggtgaatgtaagcaagtatttctcttagttctctgaaggtgctccagcaatgaatcaaaacgaagtaaggggtctggggaatggtagccagttggtcagaagcacaggctacaacctggggcttgtgattgacatctgaagttgggggagttttgtggtactgagccctcagcctgtgggatgtgtaatctccaagtacagtgtcagaatccagttgaattagaggacactcagctggcatccattattggcatgcagtattccttgtcatgagcctgggcaacatagggagacctcatctctacaaatatagctgggagtggtggtgtgcacctgtggttccagctactcaggaggctgagtgggaagatcgcttgagtccaggaggcaaacattgcttctcctccaaatgctgtactttaacatgtttggaaactcctgcaaaggaatttcaacataagcgaagtcaatgggttataaaggactgaatgccattttgtaaatgtcagaaatcaaagtcacaaccaagttaagttctagattagggccaggaagagaaatgtattatctggtcaaccatatcaaatctgtattttggtggaagagcattttcttatattggttctgattggtttgatacggacagggaactgttttctttattccagttatttgttttgttttgtttctgagacagagtctcgctctgtcgcccaggctggagtgcagtggtgcgatctcggctcactgcaacctctgcccctcaggttcaagcgattctcctgcctcagcctcccgagtagctgggattacaagcgtgctgtagtttttgtatttttagtagagatgaggtttcaccatcttggccaggctggtcttcaactcctgacctcatgatcccacccgcctcggcctcccaaagtgctgggattacaggcatgagccaccgcgcccggcctattctagttgttaatcagttaacatagccaaaagatatagaataagattgtagactgaatccatagtctaatgatttgtcttcctagtaattgtgaataattcagacattcaaaattagtctggcatcatacaaacattagactagtcctaaaatgaggatattggcaagtgtgttaataaaaattgcatatgcagtattaataggttccttacgtaggctgccgattactcaggaactgtcagatgttttgttttgttttgtctttgagagatggggcagggttttactctgctggagtgcagtggcacaatcttggctgactgcagccttgacctgctgggctcaagcgatcctccctccacagcctcctaagtagctgggactacaggcatgcaccaccatgcccagctaatttttgtatctttttttagagacggggttttgccatgttgcccaggctggtctccaactcctgagctcagggatctacccacccatgcctccctaagtgctgtgattacaggcatgagccactgtgcccagcccccagatttttaatcttctctttgacattgagtttcagaaatgaagtataaatggtgaatttttagtgtagaatatgatgcactaggaagatcacttacccgtttattcactttcttagaccatgtcaacccgattctgaatttagggttctgttgtgatggtgttctttagaagtgattttaacactcaaaatactatagtctgtaacataatttactgattttttaatttttgcaaactaagttgaagtaatcaagtatttatgagttctttgggtgagaccatctgtcaaagaattctgggcttaatggagatacatatatgttgtgaatactaaacagatatccaagtaataaagcagaaatcatatgctgtgtaacagaaatgtaaagttctgaattagttcacgagtaggagagaaacttttttttaaaggtagaggagaactaaaagtaatttcttaaaagagtgcctattttacatcttgaatattaaaagtctaattcagtgccttgggatcttgttctttttgtagattttgatttgaatgaacttcagtttgctgaaatgtctaatgggtgcaaagtacagatttaattataaggttgagctaaaatcagaatttaagcatatggcatatataataccaatttaatctttcccccttaaatttagttatttttagtgagtcccaaacaccatatttgagacatcacttttttcttttttaaagagatagggtctccctatgtgaggctggagtgcagtagctattcacaggctcgatcatagcaaactacagccttgaactcctggccccagtgagtgtaatgtctcaccatgccaaagtacttttatcttaaattgcttatttttttgtttatttttttaactgactctgtttacaaaattaaccttttatctagtgacagctagattgtatcacatttgtcatctatggacaactgatttttagttgtttaatatggtaagtttattattgtttttccttatttaagaaaacaggatctgagtgaaaaaaaaaaaaatcttaattcaactatcacgattccagtaggaagtagacagacattcatctgtatacattaggtgtcaaagtagagttttgtggtttatcattctgaagatttgagattcaagacatgactatctttcagtcatattgtgcaatagataacatataatgtttctcactgatgagaacagttggttagatctctcagatgacttgaattaggtattagttcaagtcagttgtcagtaagtttggctttatcgttcagaggagcttcttatgactggacatttctcaagtattgccgtattggtcatttggctatcaatgcttaaattatactcagtatagtataaattttcttatttcccttatttaagcatgcctccattacactgttgttgtctctaataagagtttaataatctttgttttggcttagtaaaaagagccaacaaatatatgagtgactgactgagtgtattgctctatgcgcaattgtcttaaaggaaaaacgtttatagaatcactgtgaacaataaaatggttgcatttcgctggaaaacctcggtgctcctttggtaaataatgaagtgttttgttttacgggccttttcactacttcattgacaacagacctttttttttaaattaattaattaatttatttatttatttatttattttttgaggtggcgtttcgctcttgttacctgggccggagtgcagtggtgcgatcttggctcaccgcaacctccgcctcctgggttcaagcgattctcctgcctcagcctcctgagtagctgggattacgggtgagtgccaccacgcccagctaattttatatttttagtagagaaggggtttctccatgttggtcaggctggtctcgaactcccgacctcacgtgatccacctgcctcggcctcccaaagtgctgggattacaggcgggagccactgcatctgaccaacaacatatatttatattacccagtaataggcatagtctaaggaagataatagaatttattcttagtagtgaactctttggcttttgaagcagaatttttttttctttgttcttttctgtgatagtaaggaaggaaggaagggaaggctactactaaaaatataaattgctaaatagaagtcaagtctctgggtgttgaagctcacatattggtgctgtccagacctgacgcatctagaaacaggaatttgcccttagcgtaagcttagccaaatggttgagtcatttctaagtattttaacattatagaatgccttaggaaatgtcatgaatatctaaaacaggtcttcttgaggattttattagtttcttaaaacatggaaaggaacttgattctcagtgctggtacctaaaattcaaagacattagttgtgagttgctgtgctcctcagctctaagccacagttgtcatggccaagcctgtctccttatggagagtggccttgctgtttcctgcagagcttctcttgtgcctggcttgtgcctggaagtcagcgtgtcaccacttcagagagacactatagaagcttggtgatcttcaaacaagaacttaaaacaaagaagttttctttcacagatatcttaaaacttgtagctaaataaaacgtgaataactgtgagagcctcattacagcaatttttaaaaaagcagtacatgttttgttgtatcttaaacatcacagaatggtattgtgtgtccagttttgtttgtaaaatgtaaccttcgtgtgaatgaccatctattcctttctttttggaaggttagtttgtcagctgttgtgtgatgctcaacattttatgtaatgacatttagcacaacgtttcaatataacatctcaggaaaacatttaagaaatagtgaagttctctgggtattacattaatcatattaattacctgttgcttttaatttatcaccgtatcaccctaatatcacaaggcatgtgtagtactattttgtaaagattttctaaagaccttccctctataggaaggaaaatttaattcagaaattgggctgaactctctttcacttgtgtgaaaatgggaaaattagaagtaatttgtattttttattgtgaaatcagtgtaggaacctgtgctcgtatcatggaaacaacagcactaatgtttttctcccctcgggtgtgggctttgctgcagatatccatgtcttctactttttctgttcttagttcttattcacttattgtctatacttcgtgtcactttattgaatttcacaaatgcaatttaggaatccagggatgtgataaaatttgtgcatctgcttgtcattagccatctcacgtttatatcgctaagtgaaaatttaacttagtttggaacaaaccaccatgatttagttcacctgtatagtttaaaagacctaagacctgaaatttttttttttttttgaaacggagtctcactctgtcacccaggctggaatacatggtgtgatctcagctcactgcaacctctgcctcccgggttcaagcaattctctgcttcagcctcctgagtagctgggattacaggcagctgccaccacgcatggctaatttttgtatttttagtagagacggggtttcaccatcttggccaggctggtcttgaactcctaacctcatgatccacctgcctcggcttcccaaagtgctgggattacaggcgtgagccatggtgcctgtccaagacctggaattttacactgcattgggaccttataaaattcttgacttgtacccttttggcattttctgaatgctcatgatttgcttctgaaatattttaggcctttggaaacactccttcattctaatcctctcttttcttgctctcaattcttcatgtcatgtaattattttgcctagagccaaatctgatgtgttattataatcatcatttctgcaggagcttggtaacactcctgcttttgttccctttaaggcttcttttggttttgtttattttgtttcactcagaatgatctggttaagttttgcttgatcatccatttcaaatctcttagtacatttttcaaattcagttccaagcatgttaaatgtgtcacaatggaagtggcccacggtcaaatacattttgggaaaccttggttttaaaaaagttaaactgacttcattattacggttttttttttcaaaagcctccagtatccatcttgaatgatccatttcccatatgtgttttatgacagaattctccccactcccaggtaataactgttgacattttctgaaaactgtttttgagaacactgaattagatatgaaatgaggcatttattcatacttcgaaacgaatgtcttaaacctcactgggccattttgagtatacattactagtgatatatttaataacttagtggtataagcatgcaataacaaatttcttacacaagagaagttctgtgtagaaacaaatttaatactgtggctaaagaaatgaaccaaaaaaatttaatatcttgaaatttgcttcttagctctgtttagaatcattgtgattcacggatagtaaattgtcagagtggacttcatgaaccttatatcagacattctgaaaagagctaaaattgccattaaactgcatgagttaaaatatcttagatagtttaaaaatactatgtagacttggtgagtcagatctgccacactgagcgtgtagctggggttgacgacacacgtgttgcagtgtcgttaccagtttgtctcttttagagacaacttggcaggcagacgtcttgcagataaacaaggaaagattgtctattttaaatggcataagacattctttaaaccagtgtgtcatatgtggttatatagtcagcattttctttagtgcaggaaatcctctctcagggttcctgaataaatagcaggtatctttgtagggatagctcgcaggagatttcaaatgctgtgtattcatcagttcaggctccccagatgtcttacgaacgtgctcattttagttttcttttcttttccctcttcctgctagatacaagttgagacaatatgattagctcttaaagtgcttactctccattttatgtatattactgcattttaatcctcataatatcctgtgaggtgggatgttactatgtccatttgagagataaaggaaatcaagaggtaaagttaactggctttctccaaacagctggtaattactaaatacagaattgacttttgccttttgattccaaagatcatattggtactttcatgtgtgggtcccttcagccagttcctacagtgaccctgacccagctgtaagtcccctgaggtctctagagatatagacagtgatggattagaccctgttcatagttgcagatacaagacatagagaggtttctagcaataatttttttagttatatattttcatagggcttttgatttatgtaacctattagtatatatttgttattccagtagagttaatacattattcaaagagattccagtttttaagccttttctccgtttgtctaagttgttcattatgaaatgattggctagaatttgaaagtctttacctacagagagattctgactggcttgcttggtcttggaaccctagttatgagtgcattgtcttgcttcctggtgaactttgcccagaaatagttaccacctcattttttttttttaaatgaaagctggataattaaccctcaagatttcttaattaaaagattactattataaattgacccacagggagttaatacaataaaattatttttgatcattttatatgaaataattatggggcaatcttctgtaatcttgagttgaaggggttatcttgcttaatgttaataacttttgatacaccaactaccttttaaaaattaacgttttttttttttgcttctgtggaagggaggctgtattttgtaggatttacagtttacatagttattgttttatatgatgtcagttggattaattatgttttgagtggaaactctgtttggttcaaccaatatttgaatgctaattttgttctgtgaacaaatagaaatacagagaacagtaagacatgactctttccccctaagtaaaggcttaggttggagttttcaacctgggaattactgacattttgagccaaataattgtttatgttgggtgggggagggcctacagcggaggctgcctgtacattgtaggatgtttagtaacatccctagcttctacctactagatagatgccagtagcaccacccaagtcgtgacaatcatctttgccaagaactttgaacctctacctagaaacagttcatagggctcaaaaagcaaagtggcctaggacccatgtagttaacaagcttaccctgttggagaaccactgcatagctgaacaacatgggtgagactagtgtcagggtaaaggagctcttgactggagattggccgtacacagaaaacaaagtgagtgttatggatatttggggatttaccttcattagggcacagttggttagcgttaggtgtacaccaacattattccctctttagaaacagccatgcacgtaacattttagcacatctgaagaggcacttctattctaattacctaaaattcttattatctagaattacatgctatgaacaacagcagtaaagtcagaagccagaatctatgtgatgttatctgttttgcgatcacagttgtgttcttctcttagtttatttgaacaagtttgtgaaaaaatttttgtgcttatgtaaatactctttgcttagattttttggtagaatgtaaatctttcccacacagtgcaatacccctcctgcccaagggcgagatatagattgtacagtttgttatttctgtgttttagggcttattcctctgtagacatgtcaaaaagacatccgtcgggggtaaggaatgcattagcaattcaagctgataatctgcatggtgagagtccagataattttttccccaggtcacataggcagctctgcacaagtctgttaaacatatgctagttttgaaaattaaaataagttcccatcactcaaggcaatgaaacgtagatgaattgctctgccagattgactcttagaactcctgatgtgatgtggggctagacagaatgggatgtttgctaataaatcagggaggtagtgattgttttccttctttttctcccccacccccgtcaggacaaactcacattctgtagcctggtgcactctaataatgcctgttgaccttggccatgaaagcactctagactcaccccctaaacaccgcaccgaatgtgctcatccttgaaatttacaagccttagaatcttccctacctccactcctgtttactgcctcctgttactcctggtgcttccagtcagaccgtagtcttggctgtgcagtacctttaggagccctcaaaaatgtttaatttcttttaaaatcagaaggaaaaataaagaacaagataataatcatgaatatacaataatgaatccagcctgacttagagttgtctttataccaatcaacagagccctaaaatatagcttttaatgtttttttaagagagaaagaggcccacgaaagttgtcctggggcccccgcatcctcctcatacactggtgggatgctgctcttgcttgctttggaatgtggcagcagctcccagtgacttcacacgtttattacaaattcaaggtcatttggacgctagccttgtgctacctttcatgcttcctgtccgacccatactcagcctgggcatgttttctgctctgatctttggtctgccttccttctccttctccaagtcaaaccagtcactctttcctgagagctcttcggtgtacccttgccagacctctgcattaacactccagcacctttggttagccaatttggccttatttgtgtctccaccattggattatctgtccatcaaggtcaggaatgttttcgggttaccccactgtccccaactttgaatatgttcactgcctggaaaatgtttatctgaatataaggcatcaagccagaacttgcccaaaacttaacctaggactcaaacagctttgaaatcttatctgtgtagagtgggaacggcatgtgtttgataaccatcagcatttgctgttttgcttagccatcaacaatccgtttctatctcttcctcatagtattttcagctgtatttttgtacagcagtcattcacgttaggtgttaggttacactgaaatctctgacaaccagttctgtgctactgaaggcttttagcagcaggattaaaaaaatagttgattgcacattcgaagtctcactgctcacactgtttatgtaattcttggagtccagttagatcatctgatttttaaaatgttgcctgaattacaaaggagttcaggaatgtgttatcaaagaattaggaaattaacattgaaatttattgagcaacatagctaataggttgtcttgctttttaagccttcttgttttctaggaggagcctgaagtccgtggacaagttgaactgtagctggtatttaggaattggtaaagacagaggtgtggatgctatgttttcttttctctgttaggaaattactctcctggtgccacaataaaaaatttcacaggtatctaaagtggaatttattttgtattgttccacacctttgtcaataattacattttctaccttctagtttattactgttattatttttcatgccaggtgtttcttaattgttggcataagtatttattgaatgcttatatgtgggagtgagagagtcaggccagtgctaaagagtagggaataacccctagacagtgaagtaacttttgtcttgtttgcacattaaaaaaaaaaaaagattaggaatccttgctctatatactagaaatgtttgatgttctcttttcttctcttcaaacagagaaaacttagatgaatacttataggctctactgtcaactaactgcaccctcctaatattggcgtctgcatatttttaccattgtcaatatcagattgcctctgatgttgtgtcactgaaactgatagtaacattacatccaagagtaagactgcagtgtgatttttggctcttggtcttctgttctttcggcaacaattttttataaatatagtcaagaaaatagaaataagagtcttcactgctacctccccttcagaattattttctcctagtattgtggttcctgatagcctttattcctatagaaatggcaattcgaaaaattccttctgtgaatctgagggctctacaaagggagagcttctttgatagtgctttggtgtaagttatttaagaaggacaatctacccaggcttatcaagcaaataacctggaatttaaacctggagtattctttagtgttccaagtctgcaggaaaagaagtaatcttggcttaaactaaataagttaacagaatacaatttgaacaatgaacaagaatgctgtttgaaaattatcttgggtttttatgtcaagttaatattctcactgaatttctattatgtttgtaaagcagctttctcctagaccaaaaatcctagtaataaaaccacaacagtatgagagttataagcacacagtaaaggctgatgagtaaatgttatgacactttgaaaggaaataaaccagacgatataatgtaaatatcctttgtgcttatcaaaaataagtgacttcatgttctgttcctgcaatatttctgtaaatctgctaaaaatagaaaggtaaaggtctaagatcataaatctctgatgccctttccttaaaagtaaggaattcttgtcttggattcttatataatatacttatttataatctcacttgttctgattgcaggtggcctcttactatctttacatccatgtgaatgtgtgtgctttgatgtgtacatatgagagacaagaacaaaagtaaatgtcaaatatccgaattcctgtttcagtgagctttcacggagtaaattctttttgtctacttgcctgtgatctcttctaatatgacttgcgttaatgacctttaagaaatcttttaataaaataaaaaattttattaaaatcttttaataaaaaaattttattaaaatcttctaataaaaaattttattaaaatcttcttcatacgtgttacttgaatttactcatggcaaggaccagttagtaccattttatgaaatcacaagctcatgggcttgtgataaaacatataagtgctttaaatttggcattggtaacggcaggccgactcacttgaaaaatgctctgaactgctctgcctcatgctggtgggaagtcagatggaaatgactttctagagagtttagctggcctccaagcttagtgggtactcactctccttatcccccgatagctgctctgagattttaatgcacattgaagacaatatgataacttaacctggaaaattagcattttggtaagggtctttaacttcattagtattttcataccactttggtattagaaattgtaaagatattaaagggtatggacaatgtggaatgtatgtaccagactcagcagtgtatactgactccctcactatagcccagaactggaaatcccgctaactacctctccccatcctagcctgaattgccctctccacctatgttggttttacaatggcctgacgcctgaaagctggtagaaactgtataggaaaatagggttgggataaatttctgggctgacaaaggatagaggaatatgcttctttttccccttgtccaagtatatcagcaactctaagatgcagatttatcagtatggctctactgggcatgttctagttaaatggtagacccactacctcttctggaatcttgttttccattatattcccacctgcagcttttcaaagacttattctcttctctaatggtctcttggttcttttttttgcccatgctctacgttccgagtgggtcaacattgcagtgggtcaatgagaagaaatagaggggaaaaataaaagaaccagaaagaaacctgttaagtttgcacttacttgtgcattaagcatattagcgtaagccttaaactctagaaaactcactgtagtgctgtaaagtaccactgataaagtaaaagttcatttttatgctgtgtcgttatttagtgatgaatatgatattgcataaaagatgaggatctgtaaggccaggcgcggtggctcacgaggtcaggagttcgagatcagcctgaccaacatgatgaaaccccatctctactaaaaatacaaaaattagccgggtgtggtgacgcgcgcctgtaatcccagctactcaggaggctgaggcaggagaatcgcttgaaccagggaagtggaggttgcagtgagctgagatcacgctactgcactccagcctgggcgacagagtgagactccgtctccaaaaaaaaaagatgaggatctgtgtataactgccaggtgttgtgtgaggtaccatgaataacctggcaatatcctaactgtgcaggtatgaggagtgacccccaggaatataattgcaattaaacttgcaaattatgtggggatactctatttcagggcaataaaataaattatgtctagagctcataactcttacacatatttggctaggtctatgcagcaaaacccaggtgataactgaggctttaactttgggatttgtttggtgctgactctgccacatggtgaaatttggtaggatctcagtgcgagtgtcacatgatcagtctgcttgacccaacatgccagaattccatttctcagcccactctcttctctgcatacatacctacctcccggagagggctgggcgggagcctacgtgtggcaagagccctcactgcttttgttacacagatttcaacacatatggcttgatggagtgtgattgcagtagcatgaatgtttggtgatgaaatttgcatgtcctttgctgggagaagtataattataagatttttgtattcacatagccacatgtgaggtatgagcaggaacggggtctatttaatagcattagattgctttcagatttgaaatatttccttttagaaatatattgtgtaaacaaaatatgtttaattttttttaaaaactatgcctttgtacaaattgtttatcatttgcagaggtctaaaaaatgtaggagaaaagaagctcacaaaatcaatcagatctaaagattgcaaagattgattaccatctccttaaaagcttcagtacatgtgtttacagtatcattctatttgcctctgctcagattctttccaattctaggacaacccaaagtgtatagatcataagccataactgatcctaccttacataatacattaaatataaaatatttatggccaggcatggtgaccagttctgtaatcccagcactttaggagaccaaggcaggaggaacacttgaggccaggaagttgagaccagcctcggcaacatactgagaccttgtctctacagaaaaattagccaggtatggtggtatgggcctgtactcccagctgcctaaaaaaaggcaacttgagaaagtttctaccttctgaaacaatctatgccttgattctatcacttagtattttagttattcctatcaaatacatgactgtgttaatttcttttgccacaaaaatgctgcaaagccacaaactcactccaaaatttagtggcttagaacaataaccatttattatagcccacaagctcaagggtcagctgatcccggcttagcttggctacatttgatataaaacagtagaaatttagaaattgaatatatgtagaatatctcttgtaccaaaaatgaagaggaataatagattttgatttttctttgttgtattctgtgctgggtgctaatctgtcctagctgtcagaacaagtagaagccatactggaaaatcatttatttgttactatcaaatttatttcagtgaatgccattcaaaccactctctctgaggagcccagttaccaagtcctccaccttgttagcaacatggacttaaatgcactaattctagaatgagatcttagcaaagtaccagcatttgagatttgtgcaaattgagctcttaaactgtgtgtatatgtgtgtgtgtgtgtgtgtgttcattctagcactcccactacataccatacaagtagctgtatagcaggtatatatacatgtgtatatgtacataggtaggtatatgtcaactgttgaaaaactagaaaatacacattaaataaagtaagggttgataaacattagtagttggaacattgggagatttggacttctactttgcagattcagttggctgcattagatttaaggaaagaactaactttggagaaatttgtgtttgcatttcaggagagatttcttaaagaggaaactaccagaggttagtagatattaacatctagtgatttaaatttgagaaatgcaaattagacatttaagctgtgggtttgcttcccgttttacttgctctaaaagtaatttttttaaaagccagtaacaaagacatgcaaaatagtactgccatgggggaaaaattacttgaaaataatattcaagattgaagaattaaaaaagcttgacatctagtaccaggaatgccagctggcttgttctgtcaaaaagcaagcatgtgctttggaataacactcttgagtagactctaggcgggttttgagcccttctgattatctaaatagatgtggaagtgacttatcttggtttttctgagtcaaatgagataatgagcaaaggccttagtaggtctttgatttttgcctctaaccctttttctatctgcatgttcacaaggtcaaggctgatgagatatggcaatattgagagagtcagaataggataaagatctcaaatactatatatatatttttttttcatttttttttccctttggtgactgtatgagacatgtcagtaaaactttaaagacaggccaggcgttgtggctcatgcgtataatcccagcactttgggaggccgaggcgggcagatcacttgaggtcaggagtggcaacatggcaaaaacccgtctctactaaaaaatacaaaaattagccaggcgtagtggtgcacgcctgtagtcccagctactcaggaggttaaagcacaagaatcgcttgaacccaggaggcagaggttgcggtgagccgagatcaccccgctgcactccagcctgggcgactgagcaagactctgtctcagaaaacgaaacaaaacaaaagacacacagaaaaactgtaaagacagaatgaaagagatgaactttttacatctcgctcatttcatcacatactatatagtatgtgtatggtttcatatatgttagtgtgtgtgtatgtatatatatgaagttaaaagaaaacattcaccttttaagactaaatggacattgactagattgtaaactgtttttgaggctaagagtttgtttgccatgcataaggctctattttttgtaattccacttttatattcatttatatcagtcctagcagtagatgccactcttactgggtcctgcctaaatgcatgcttcaaatgttggttattaatttcacgagtagtgaataacaaagactcctattgagggacctcttgatttcctactgggcaccagcagcaagcatgacttactggccttcttatgagtgggtaggagttttgggtcaacttgagaacatctatcctttgagtagtaaaaaagcttggtattaggttggcacaaaagtaattgcgatttttgcaccaatctaatatcaacagaggccgtgaaaaacatcaagggaggatagcttgtaattagaagccagatcaacagtgacccaaaaagaatttcaggtttccaggagtgaaatatgtagattactcctctgaaaggaattgtttttctcctattcgctttcatggcaaatcattttttaagccgaaactcaagctctgaaataattgtgtagcaaatagtggctgtgaatagatgtggcaactctccacaagggtaaatagaaaccacttgcagtttcagtcatcacattttatttttcttttttaatagcttctctatttttgctcaccacaaatacatgcacacacacacacaggggcaaagccttggaaaattgcaattttccattttaatttgagagacagcccggtcacattaacagaacccttgacggaataggttgaattcccttctctgtccctataaccccatggccttggacatatccttacctggtgccctttcctccctcttatggtccacttttgtgattctgattttaatttcagttctctgttagtgatgaaatgagcaactgcagatgttccgcttacactggaaatacttttttggcatttaaaagaaaaccctacagatgaattattcccctgaaaggggttcactcagattttctagattatgattctagaaaatagttctttacatttgacaatggagaatttaaatgttttaatatgaaaatgtaaagcactcttgtggggtatagttgaattatgcccaggttaagggaatccagtatttatgtcaggaaaccatggatgtgatagaaatagtatcgctacaaagctgggcacagtggctcatgcctgtaatcccaacattttgggaggccgaggcaggaggatcacttgaggccaggagttcgagaccagcctggccaacatggtgaaaccctgtctctactaaaaatacaaaaattatctgggcgtggtggcacaggcctgtagtcccagctacttgggaggctgaggcaggagaatagcttgaacctaggaggcggagaggttgcagtgagccgagatcatgccactgcactctagtctgggtggtggagtgtgacagtgtatccaaaaaaaaatactgagattatgcaagaatctgactcgaagaagtttgaactgattaaaaagtaccaaatacttcattatatgaggccagctatttagactagtcagcgggtggttcaaatgcagaaaacagatggctttcattagccagaaaccttaaaattacataaatccacggatgcaactaagctatggatctgtgccctctccttgccaaacaggacctctcagctagcaaaacagagagctccttgttcacttttccctcctagttgagaccctgttggggaggaatgctgccaagcctgctctataaggaattttgatctcctagatgataacagagagaaactttttggagaaagggaacaccctgtttgaaaggacaacaagagaacttgttcaagaaggtggctttgcatttaattgaaaattgtagcaactgtaggcgtagggtttccagattcacatctgcagactggtccagattaggtatatatgtttatattcgtttatgttatccccttaagcctcttttaaagccatttctaaaaattgctttggaaagtccatttcacttcagtattctttatattgtggctcaaaaatattttttttctggtaacaaaaatattttctttctgtttttaagacttgtagcatttttaagtttgatatgtacgtctctgtagttcagagcacttggtaaacagcctcttgcttttgaggcaatttatgaatgcttcattgtttttagctggttattttgttcattgtcaggaacactgttttcccatgggaaagcatctccagttttatgatgtcagtggcaagtcattcagtttacaagaattaccttcatattcagtcttagaaaagcatagaccacaaacggccagttatatcacagttctcatcttttaaatgttgtcttagatttttgcaaagtaatcttaactcaccttagaatagtgttaagacataaatagaactaaaatgtagtagttaagtggttatatttcccatctactaaggtatttatatttcttttcttttagaaaataaaaatgtttaaaaaattaggaataattatctttaggatgactttgtaagactgtgcttttttactggcagcaaatacctgccagatttcaggtatttggcaggtaaattgaatcttaaaagatttcaattttaagagtgtccatattaacagatcctgaataggaccctgtgtatcatttattaagtcatttcttggaggcttcactcaggaaaagggagttaacccttggatggcaatgtttaatgtggccacatttccttctggctgaatgccagggagtggctgcgcttagcaaccaggctttgtttcataaatgggttatttgatgcaggtgaggatgccgtgagttgtttgtcttgttttaattcagggagacaggcatatgtagtgaaagcatggaattgtttgcagatgggcttcagtaagaataggaaggtttctggttcaatttgtatctccaagctaattgctctgatttccatatacacatctggtgttggttcggggggaaaaaattttacttgagaaacatggcttttgtgagttgatatttatttgtgaagggcctcttgtaatgtcaaatgtaagaagatctatacacacaaccaattttacaatttctaattcaacagcttaccctattattgaggattcgcagtttaaattattaaatgatctccacttgaagaaaatagagcatgttaatcatcacgattctccaaacatttatttttaaagttaatattaaatctcatctggtggaaaacctgacaggaactgaagcatatattttctagtctaaactctcattgttaaaatgaagacaacatgagacagttatagcgccgtaatcaagttatttgaaaaaaatgttttaaaaattaccactttttggtagtcaacatacacacatatgccaacagatggcattaaaaaatggcaagaacatgagacaattatagggtcataataaatttatttgaaaaaaatgtttaaaaaattaccactttttgatagtcagcatacacacatatgccaacagatgacattaaaatagctgtaaagtcaagaagcagggaggatgacaaagtgaaaaatagaagaaatcaaaggaagttaagtcaaaagaggaaaaaaaaatgaagcatttacttggtttgtcaggtagggtgatccagtgtattttgccaaaaactttcctggttttagcaccaaatgtctcagaacatggcagctgatgacctccctcacagtgagtgatcccagagagcaatgaagaattgtgatgcccttcatgaccttgttttggatgttacacatcatcatgcccttcagtgacctttctggtagcaaagggtttgtttttaaaagagttgcagcatctttaagtctaatatatacatgctcggaagttacaccatcatcacttctgctgtactccatttgttgcacagacagaccctgatacattgtggagtttcccagggtccatgaatagcaggaggcagggactattgggggccttcttggaggctggctaccctggggagagaaattgtcaatttcctctccttgcggggaggaaatggaatcaagtgcatttgtattgacaagaaggtagaacgctttccttagacattgtaatgaacagattgtggataaacaaaagtacagagagagtttgaggcagaggaggagactgtttcaacagaatatttaccagctatggtaaaggctcattagtgtctccgtacagttaacaacatgctgccaagactggaaatctttgggacaggaatgaattcggaaggtgaacagaataaagtactgtgggaacaatggcgattccattagtggattgtacattccttacgggcagggccctccatagcatctgatgtagggccttatccacaggtatctgattattatttgactttctttaatgtttttgcagtgttattatctatactacttatttcagtaagattgacaacatttgcatttcgatttctaagatcaagacaatgaatttcctcttaatccctcaggaaagctgtgaaatttaaatttatagagcattctacttagcctgctgctttgcatctgtcagagaatgagaccccccagtttcatggaagtcacaggaagtggcaaggggctcagatggagttgaggggttctagctatttctgcagatgatctggatattttggcatcggctgctttgacttaaccatctggcaatgtaaaggcagaatttcgttaaatattggaaaagttacttgaaaacatggctctagagattttgccagcagcttttgcactcatgacttggttcaatctaagacctgttttgtttttttgttgtaaggacctaagtcctctgttgggttttgacgaagtatgtgtaaaaatgactaaaatggccagaggtatcttattttacatttatgtgggaagaaatgtttggaaactgtttcatttctttaactgaaaatttctcagtgcaattttagttggtgtttttcctcctgtggacagtttttaggaatgatacaagttatcgtggaatcacccagttcttgagtgtgtgaacgaatggcttctgctggaagttaattcttcttggcatgggtgtctcacatttccccagcagctggatttgacaagggagggcctatcatgattaatatgccttctaattgattggtttaataacacctttactcctgtggatatatttttcatttcttgctgaatttttttttctttttgagataccagaacctgttaagtgacacggtatagatatttcaggacttccattttctcttttaaaaatatttttgtaaaggtaatgcctgtacacagaagagtttgaaaatacagaaggcaccctttttcatgaagttattttgtgaagtggtctattgcctgcaatggtaatagctaggaccccttacttactacccagcaggcactatgtagagctccaaatgagaaaatgttggctccttgcagatggttgggagaggagacaccagcactcttaacagacttgttaagagttgagactgataaccagagaatattctgggggaaaccaggagggatcgccaacatactcagttatatttgtggatggtgaattctacagtgaatttttctgttcaaaatcataatacagtcacttgctaactaccaacgccatacttgctctcagtgctgagaggtggcacaaatattattttcagtcttggtcatcaggcagggcctggcaggcatcatgctctgtgtgagtcagtggagtttattataagaatgcggtagcctccacagtgattatatttattataggaaaacgtgtaattttgttgtcagaacctttcagcaggtaccacaaaatctcatatgggaaaacgtgtaaatttttcatgaataaattcctttcggtattggtaatttccttctctgttttagtataaaagaaagcattgccttataggtggctaagaacatctgtagcatacataacacttaatctaaaggagtgttgaagaccgggctgattcctaattgagaatgagcaagaatagaactctttttgatagttatccctgttcttcctccaagcctctgccttggagctatggatactataactaactgaagcttcttctttcaggtacccactgatggtaatgctggcctgctggctgaaccccagattgccatgttctgtggcagactgaacatgcacatgaatgtccagaatgggaagtgggattcagatccatcagggaccaaaacctgcattgataccaaggaaggcatcctgcagtattgccaagaagtaagtcctgtccggtggctagcaattcacgttggatcacatgcatttgttttcaaaaaatttaacttcttgtattttgcatcagtattttaaccctacagtaaaaatcttggttcctaatgattcaccataccattaatatatttatttgcattaccctatgatatacatataaatgtttttaaaattatgatgtcgtattatgaccatcactaaacagtagtttaagatgtcacagcacttttttttttcctcactctgtcacccaggttggagtgcagtggcaagattatggcttactgtagccttgacctactgggctcaagcaatcctcccacctcagcctcccaagtagctggactataggcacatgccaccaggcctgactgattttttttaatttttagtagagatggggtctccttgtgttggccaggctgtctgaaactcctgggctcaagcgatcctctggctggacctcccaaagtgctgagattacgggtatgagccaccatgctcagccctccacactcctttcatcttcagtatatatctcaccacggctctacagtcaaggtcttttggttaaaagtgctagcattaatttttttctgttaccagcttgatacatattttagttcatttgtatctgtttgtattctattatagtttggttttttcctcccttattaattttactttttgactatcatgttagttctatgaaatatactcagaaagctcacttttcactcattctctattgataaacattttcattgttcctgatttatttttttggcaaaagaaaatacatatttttccttcttgtacaaaaaaagtacaaagttcactgttctgcactttgcttttttttttttttttttttttaacttaactttgtatcctggaaatcatcctttgtcatttcgtggagatcttcatttttgtttaattctttgtagtctttttgctgttactatacagggtgctcctttcttattcaatttaaaatagctggagttccaggcattttatctcacacttcttagatagttatctctgcattgtgactgcatcttaagaacattagaagtaattagtcttatgcttgttggcaaagcagaattctcgacactcattataaacagcagatagcctggcaacattttcttttgttgtaatcctttttgtactagaaatttttctttagcctacttggataatgaatgtttgttgtttaattaatattactattctattgagatccttttattttaaattgtaaatactaaaattattattattaaaaggtttaatttgttttgatagcgctctgtttaagaaaggacaagctctaattactaattggtgttttgagaagcaaaaagcatctacattatcacaatatattacatattaagtaatttttatcttgaaaggagtatgaaccatgatgtgaaatgatgaatagtggaaatcactaatacttaagttcattatatgtattttttgttttgttttgtttttttttgagatgacatcttgctctgtcgcccaggatggagtgcagtggtgcaatctcagcttactgcaacctccacctcccgggtataaatgattctcctgcctcagcctcctgagtagatgggactataggcacccgccaccacgcccagctaaatttttttgtatttttagtagagacagggtttcaccatattggccaggctggtcttgaactactgacattgtgatccacccatgtcagcctcccaaagtgctgggattatagccgtgagctaccacgtatggtccattatatgtatttttacaagaacattctgtgtgctgatttactaagtatggattgataataaatcagcttttgcctgggtgtgacttttataaagtgtcaatgttagaaataatatttacattctgctgaagagttcttgtagtacaattgtgtagataagttataaattttataaatcagaactctgtgcatacttatatgtttttgataccatttttttgatatatgcatacagactatgtattctgagtgtcaaataaactttttttaaaggctagaattaaaatttagtttatgacattgaccaaattgtccttttctggtgaatcgactattttgatacatgtgtcatagtttgcatctaagtttttcttcccttagtttcacgtatgaataaccagatgttttcacatttgtatggtggccataccaaaaattactcttcttgaccccaggaacacccctcttttcccgtttcacttagagatcctactaatgcctgggtagctttactttctgtcttagcctgttgtttgtcccagggtgtattagtctgttctcacattgctgtaataaactacctgagactgggtaatttataaagaaaagaggtttaagtggttcacggttccaaaggctgtatgggaagcatggctggggaggcctcaggaaacttagaatcatggcaggaggtgaaggggaagaagacacatgttcacatggccagagcaagaaagagaaagagtgtgaagggagaggtgctacacactttcaaacacccggatctcatgagaacactgtcacgggacagcactcgagggatggtgcttaaacattgaaaccacccccatgatccaatcccttcccaccagaccccacttccaacactgggaattacaattcgacatgagatttgggtagggacacagagccaaactgtatcaaagggttgagcacagagtggttcttcccagttctggactttaccagattgttggtggccaccatgagtggggagaattagccctttgctgtcaccttcctcttgcaattctggtattatctgtcctctgcctaccacccacccacggaagtcttgttggatgatacacaccagccagattcttcaacattaggcgccataagtaagaaagggccaaaacatcataccttgtgagccattttaatggatttgggctttattttgtagcaacaggaagtcactagactttattttttatctatttatttttttctttttttttcttttgtttttgagacagagtcttgctcttgtggcccaggctgcagtgcagtggcacaatctcagctcactgcaacctctgcctcctgggttcaaatgattctcctgcctcagcctcccgagtagctgggattataggcgcctgccaccacgccgggattttttttatttttagtagagacagggtttcaccatgttggccaggctggtctcgaactcctgaccttgcgatccaccctcttcggcctcccagagtgctgggattacaggcgtgagccacccgcacccggcctagactttattttttcagagaagaggagtgattgtagatttgcatttaaacaaatcaccttcttgctttatcactatgtcccctaccatatatcttcgttctcccagagactgccatgctgcagcctctagccgtgtgctgtccagtactgtagccactggccctatgtggttgtttggcacttgaaatgtggctagtggaaactgatgtgtgctataagtgtaagatagataccgtatctcaaagatataatgtgagaaaacctgtaaaatgatcacattcatttttatataggtttaacattgaaatagttatgttttgaatatgttgttaaatacatcataaatgttactgagttgtaactatgtgattaaaattgatttcacttgtttcttttgacgtttcacgtggcagtgaggaaattgaggttccataggcagttgcattctgtttccgtggaacagtgctgttctctgtgctatcccgagccaccagtgactctgagctgtaagggtcttagatcccatgatctggcaagtgggagagggaggtagaaatgagtccctccataccttcaaccagaacttcactgcatgttgcaagtcagggaacaaggcttgtttggggtccttttaaatacatctttcattaaatacatttggatgtaagatgattatatgcctttctagaaccctgtggtgctctcttcctcctcagacataatgtctttggatactaagggtgcattgatgaacagaacacagggcctgttcttcaaagggggagaaaagcttgtaaaatcataattttagcaatctaaaaactacatggtgacagtgacactaataccatcagcattgagcattcacaaagggtcacaaagggtcagctactatgctaagtacttgcactcattttacccactcagtgacacctgtggagaagaaccgaagaaagcaccttggggaattgcagcattgaaggcaaacaaagagagacgattccccatgagggagatgagcagtggccagagagataggataggaagtaggaggcgttacatgctggaaggcaagccatgtaaatttctaaatgaggggaaagataagagtgcaagcatgatgcaaacggaaagcagttgaagtgtagtttttgacatggtaaaatcatgtctgtcatgcagactgaacacatgtcaaatattttattcaattcattaatgagatgaactgtaagatgtgaaaaatggttcattttgacttggagagatttaaaattccttccccagcacacttgagttgcatggctatgaacaggaatcatctggaattatctggaatatcgtcaaattatttccatggtacaggaacacttgcattgctatggggtgtctgcagtatccatctttacaaagctctaagggtgtggaatagcttgtaaggatgtaagtaataagggtgtaagaattttaagggtgtaagtcgtaaaatagcttatttagtagcaagtcaactggaggaacatgctgtagaatcagataatcctttccccgccaccctcagggtctgcaagacaacacctgcatttcaatgctaggacacccagcaatctcttttgctcatatcttgtttttggacatttgtatgtgtgtgtgacaaaacattgttaggatctggcaaatagaaggtcattgttgaccctgtggaatagcatggggagaagttacgttgtagtccattgcaggaaaaacaacgtgggtcaatggtgagtcagctgtggactcctggaggaaagacctagaggcaaaaagctttgaggtcattgaagacaaaaggaaaggctttgtgattttgatttttaaatggaaggaatttgggcctaaggaagcttaaactaaactgtgggaaggactgatacccatcctaagcactagttgcaggtatctcttaagaactaggttttggccgagctccgtggctcagacctgtagtcgcagcgctttgagtgagaggatcgcttgggcccaagagtacaaggttacagtaagctatgactatggtattcagttctgtaagaactaggcagaaaggagatccagtggatatgtgattgcctgggtcttggaaaggggagggaacatctccttttctgaggaagaatggggagatagggtgggttaattaggcagtttcttttgccaggtgataaaaaccccctaaacaatttgtattttatatatggagaatattttctcccactgatgggaaggatcgtagtgtgggggatgcttacccaatttcttaaaaatgtacacagaaatgagatccctaggtgctggaaccgagggtcagtactgcctagaatttccccattagggtctcttttgtttctgcttaccttcctgctgtgtgtttactccttttctcctgctaagatgggtgtcctcaaggagaccagggatgttggtagccacgacctctggtagtgttagtcctggtttggcatcccaactttgttctgcccatgggcattatcagggagtgcttctggttggcactgctttgagttacacgtctgcccttggagccaccaccgtatctgcagggactcagtatcaggactagcccatcttggccttgtgggtgtggccgtgtgatgtggggagaggagctgttgccagaagagggatgaggaatggcatgggcaaaatagaagaatgaccccagtgctgcaacacagtgggtatggattagaaaaggcttgtaggctggacagggcgaggtgagggagtgcatcatgcattaggattttaagtggctttttggggagtattgagcaggtggcaggggagacaagttcactcagaagttttagacagtgttgacattttctttcaaattgtgcatcttgaattctctagaacattctttatagatatttcaggatcttcctgccactttccacattgtagctattctggtgtttttcttttataattagaaataatgaatagttctcatttgtaggcttggattttcatgcgtgtgttggaaagtgttcgttttgccttttttttttaacttcatgtttttattttttaaaccgtattgatggattcattgctaggaacggcaaggaaaagaatactctcacaatgttaccacgtttccttctcacaggttttataagttgtattatttttatattttcaaagttataatcttaccatctcctctgttgccatacttctcattcatagggtctgtctttaactggactcattgtttacagctagtcttttcatcagatcatctcaaaccctgtattacattaatattttgattccgttttgttggatgactttcatcttaatcattcttattgttgaacaatgtttttcttattattgaacaattgcttcattaggtatagaattcctggttgatgggtgtttgattcagcaccatgaaaattcacggtattctggtatctgtcattgggcaaattcttcttctttttttttttttttttttttgaaaaaaatgcgtggaaaccattagttaccattgacagagctactcatttaatgattttttttttctcccaatagtggtggatgaattttttactttgcgttctcactttgtgtctctcatgaccaaaatattttagagataactagctggctaagtctgaggtggctgttaacagtctggtcctaggatagaacaaaaccaacagaactcatcaccgtcacgtcgttttgactttttgctcacaagtttaactcattgtttaatttgtttttccaaaggattgctttgcagtatacatgttggtgcatagcttaacatgatgataaatacataactttgactgtgaattatctactctgctcctttcatagtctcatgcttctctgaatttgtattttgtgttactgggttgttttgttgttatcattcatagtgttttttttgcccttgattctttgaaccaggttttggtcaagggcaaggttcaagagaaaaagtaaaaacacagtcttttatttttgctcttggttataaacccttgtaaagtttgattgagaagataacttggatcttatggtttaaattgagtctttgtttaatcccaagtcttccaaattctttgtgcttatgtattctttcctctttcccaatcgtaatagttttgcttctgcctagtcattggtcaaatacctgcctttcaatgcatttaaaaaatattttgtgttagcaccatttgagatttttccccccttttttttcaagtatgtattgaggactgttatgggatgaatgtttgtgttcccccaaaatttagatattgaaaccctaaccccaggctattcggagatggtattcggagatgatacctttgggaggtgataactgttagatgaggtcatgagtatgtgcccccgtgatggaactagtgcccttataagaaaagataccaaagagcttgcctttttctccctgctcaaacgaagaagtcacataaggacacagcaaggaggtggctgtctgcaagcaaggaagagcggcctcaccagaactcggtcatgctggcaccttggttttggacttccagcttccagagctgtgacaaaagacatttttgttgtttaagccattcacagtaaggcagcattttgagctaagacaaagacctactgtggcttctgtaggcaaaagccctacagacccaaagtgttgtgagaattaacatttctagggatcatgccttacagtggattttatccaacacttagctctgacctagagcacgctagtcgtcgttaggtaaatgcttgtggatggtagtttctggcacagagattggagcggtaatgggcaggagttctgtatccagcttatgctgagagagcttcccataaaatggagcctatactttccttttgcagagaccatttctatccattgatagaattcttttttttctttttcttttttttgacgggatctcactccatcgcccaggctggagtgcagtggcatgatgtcaacccactgcaacctctgcctcctgggttcaagtgattctcatgcctcagcctcctgagtagctgggattacaaggtgcacgccaccacatgtggctaatttttgtattttggtagagatggggtttcaccatgttggctaggctggtcttgaactctagtgatttacctgcctcggcctcccaaagtgctgggattacaggcatgagccactgcacccagccttccatcgacagaattctaaagacatgtttaggcaagagttggtggaatgttggcgtgtagtccagatttgccttcagtttgtttttatccgcttcaaatgcaaaggccatgataattcaatagtaaagtcataaatccatagtatgacttaaaatatttggttgtaatattacaaagtatgcttccaaacacattaagcatgcaaaatccttatattgttctttttgtttagtgtttagggtagtttgtgtgaatcatagatgaccacagtagactgttgagttgttattttcttttgacattctttgatagaaaacagtgcttttcctctgttatttatactagaagcaaaaagtatctctcatagcattatggaaacaactcgaatacaactacgtcaattattcatcttttttttttttttttttttttttttgagacagagtcccactccatcaaccaggctggagtgcagtggtgcagtcttggctcactgcattctttgcatcctgggctcaagtgattctcgtgcctcagcctcccaagtagctgagattacaggtgcccacaccattctcagataatttttgtatttttactagagatggggtttcaccatgttggccaggctggtctcgaactcctgacctcaagtgatccacctgtcttggcctcccaaagtgctgggattacaggtgcgaaccactgtgcctggcagttattcatcatttaacagcataaagtggccacttgctttaataaactattatagtaccaaaattttggcctgaggaatttataaatataaatagaacaaaacaaaaataatattccccttgaaacatattctaaaaccaggggctaaaagttagaattgttagattttattgtcctgtttctttgggatgaaatgaaattttttaaaaaccatagttttggccgggcgcagtggctcacgcctgtaatcccagcactttgggaggccgaggcgggcagatcacgaggtcaggagatcgagaccatcccggctaacacggtgaaaccctgtctctactaaaaatacaaaaatatttgccgggcgtggtggtgggcacctgtagtcccagctacttgggaggctgaggcaggagaatggcgtgaacccgggaggtggagcttgcggtgagccgagatcgcgccgctgcactccagcctgggcgacaagagcgagactccggctccaaaaaaaaaaaaaaaaaaaaaaccacatagttttacttaaaccaaaggctttgggattccagaagaataaaggaagtgtacttcaattctacatctcaagaatctatttcttcccaaatttaatacaggcaaatttagtctatatttattgggcactgttaggtttttgtgtcaggtgttgctgagtggcgggataccattcttggcccataaggaccttataaatctattaatacaattaaattgtgaagaaaatttagaaaattgcaaaggtagaatgaggttgcaaattggagggtcttattctggagataggtggaagctatggcagatttttagcatgaatgctttctggtcaagacacttttagaaaaattagcttgtttccaagagtagattagattggggagagaaggaattcaaattacaaaataatagtgtgaaaagcattgtgggagatcatcctgtccatcccctcattcatgatatcctgaggtgctgtattaagggcatcattgctctttgtcacccgagcagtccaggaaggctgcctgttcagtcttagactgtatcctcacagtcttaaaccatatcctcactttatgatagaaacacacaggcaagtgttgtaagagttacatattgtcagttaaacaagaaattggatgagtccccatactattcttcctcttttaaagagagaacttgggccgggtgccatggctcacacctgtaatcccagcacattgggaggccgagtcgggctggtgacgagatcaagagatcaagaccatcctagccaacatggtgaaaccccgtctctactaaaaatacaaaaattagatgggcatggtggcgcacgcctgtagtcccagctactcgggagactgaggcaggagaattgcttgaactcggaggccgaggttgcagtgggccgagatcacgccactgcactccagcctggcgacagagtgagactccatcccaaaaaaaaaaaaaaaaaaaaaaaggaaaaaaaaagagataacttgaaacaggctcttccagcctctctattcttttaataacatgcagtgcacttcttggagctaggggctagggtctaggggcttcttgaaggtgttgatgtctctggtaacttacactgcagggcaggtctctggagggaactttgaacaggttaagcctcaaatgcaggcagagatttccaattgggaaagttaggtgaacgtggctttatcatctcttttattggtttatgggtattttctctttttcctgttttctttcccaccatttaacattatctgttctctgcctttttaaccttctggctttaaatgaacagttgcttaatctatagattaacaggatcagcaaacaaagcacagcagtgcctgcacaaagcagaaactgcctgttagatgagttgagcaaaaccatttcctttgcccaactttctcctctaaaatacataactgaacatgggattcccagacacgaattgtttctcaacctttctttttccattctacagttgtatgaaattaaaattaaataaaaagcaaacaacagaggtagtctttttaatcttaccgagttggaaggtatactatatacattatcctatggtagaaggtctggtacattcttgaccattattactttgctatgggcacccttcacccttgtaggctgaaaattggcaaatcataggcacgtatacattgtggttttggaatttgaaagatctcaaattcatattgagtgagacagtttttgaatggagggatcaggctgtctatatgtggatatattttatgcatttctggtctgtataaatgtaaggattgctttactgaccgtagatttcttctagggttaaaaagttgaaggcagtttggatattttaaaataagaaaattagccctacattgaaagagagaataggaaaatctaggctatgtgtacacatctgcttgtgttttcacaattgtgtcctgtcctatttatttttatttctctcccatctcttccctcccacccacaatttgtttttcattcaacactttgaaattagaatagcttatctatcaaacaaggttctttgacaggattttccaactctgagtatgaaagtgtggatataacaatatatttatatagaatgtcagaagcagagtttggccagattattgggaaatattctaacgccctgcagcattttaccgcctttgcttttacataaggccatcatttggaaacatagcatgctgatacctcccattattgcagtagcgtttcatcagctgcacgctgcctctcagcgcctcattaagttgcaagcagagaacgttttcgttttccagttctctttctcaattaagttagagattgtattttcagtattcctcattattaaaagaatttttgttgagaatagtttaagatgtgatatttctttgtattccaggaaaatttaaagaatgtcattgaaatccagaaacagaagtatatattgtctaggacatgctttgtcttggtttatatgcctaagtccgagtagtttaaaatttatgattaatatactctttgaatgcttagaaatggcatcgattttagttgttctagtttcatcttaaataaattggagtaattactaactcaggattatgatgtgctacacataaaacatttgcagtgatgtctggtacttaggaaaccctcagttatgacatttttcttactttcttcttggatatgttctttgaaaaagggactggtatggaaaagctttgagacgatgaaaatatacaagataggctatctctgaaacaatttggtatagagcatttgattctctgtttcatgtatatattcatatatgctagctgcagtcatgcagacacaatttggatctgggtttttttttttttcctttttcacatgcagttataaatttagaaacctggctgtttcctctggactaaatgtatttatttaaattttcagtgctttaaatgcaaaattacaagcatatgtacaagtagaaagaatagtaaaatgaaccctcccatctatctgtcactgaattgcagtaatgatcaaatctagtcagtcttgttcctgagtcagtctggaatgcaggttttttcccttaactattcaggttctccagcaatcctggcaaaacacatgcgggtttcagctcatctctttcagtgacctgtaaattaagatgtgctaaagcatcacatgttactcattgacgttttgttaatatatttaaaacattttattagtaccacataatttttagcgttttcaaaaagaaataagaatttggctaaaggtgaattttaaaaattgaatgactaagtagaaaagtaggcaaactgttttcagaattagtagcaatttccaattccatttactctgttcattaactttgttttcagccttttgttagccatgtttgattttgtgtttttgaaatacctttggtcattttaggacttttggcattaatcacctgtcttaggtggcctgtttacaaaagggacttttcggttctccatttgcccttaatgttgggaatagagacaaagtttctgtaggactctgacaacatatggctttacaaagtttttttttaatatatacatttctcttcttggctttcttaaatatcatcaatgtcttttcttgctttacgtatttagcaacttaaatgtcatcttgtctgagatcaatatatttccaacttggagagatagtgagaagagagacttcagatttttaaaatgtggaacaaaacattctgatggtgaccaggttttaaggtatttcttcagtagacaaaactacttaggctaccgatgataagcttttaatattaataataattattatatataaaaatattaatataatatgatctaagattgtttctattccccctctttcctggttgttaggatttggaatttcttatgcactctttttttttttttttttttttttctgagacagagtctggctctgcctcgcaggctggagtgcagtggcgcgatctcggctcactgcaagctccgcctcccaggttcacgccattctcctgcctcagcctcccaagtagctgagactacaggcgcctgccaccatgcccggctaatttttgtattttttagtagagacggggtttcaccatgttagccaggatggtctcgatctactgaccttgtgatccacccgtcttggcctcccaaagtgctgggattacaggcctgagccaccgcgcccggcctatgcactcttaaaattatttcatgtactgatacattcactttcaatgataaaacatggctgtatgaccaggtaggtaggctgcttttcagactcctgtactaactgaatgggccccattagcccaagtgagagcttaacttgtcactcttcctaaatgccttcctcagctgagtgcttatttacagtaatctactgcttatagcagatgctatgatttgtataagctgtccatatctacttggaagaacaatattgaaaggcattgagatacttactttccctcaaaagcccataatccaacaactatttagaatatcttatttaagagataggtttataatacccaaagggaacttaatgtatactgaaagtccctgattgaatggattctgaccttaaccagaaatattaattacatgcttatcagacacttactgtgctatcccagggtttgccactgttgagggaacaccagatgaatcatattgtccctgccttcaaggattatatattctaataggacagacagcccatcagcagaataggaggtagcaagtggtcagggatcagataaagtgatcaaggcaagtggaggatgcagtggtaggacagaatggtctgcgcacagagattgagggcatcatgtggtgggaattagtgaactagcatgcaagccgggcctttttcttggcttttgttcaattggaaggagcataaagctactaaaggagcttatgtttagaaatagggcttattgaaggggacaaggcatctcctagaatccaaatgcacatcccaagacttaaaagagttagagggcacaggcaggccctgtcagatccggtctctgccagatccagtcttgtctgtttctcatcttcccttgtctctctgagtattccctgttttcctttcctggactaactgcttcttccagatgcctagtttgagtccacccatggttttttgggggcttttctttgtttttttgttacgttctgtttttgttttttgtttttttgaggcggggtctcactctgttgcccagactggagtgcagtgacgtgatcccagttcactgcagcctcgacctcctcgcttaagctgtcctcccacctcagcctcccgagtagctgggactataggcgcaagccaccatgcacccatgggtgttgacatgccacctgtggctcagacttatgctcacctccagtcaagtttcttccttatctaacgacagcctttgtgtgttcgtgaaagcccttgagggaaagaatgctacgtacagtttggttttcttgggctctaataagctataggggatggtgctgcagagtttgaaatacagtcactaatgagtcctccttcagagagctgagggtgggagcaccacataaaaggagttgggggtcagcagcctcctgatagtctgaaagccaaagatgatggatgtggggctccacggggaggctataacatgccacgttatgttttctgcccttgaggaaagcttcttttcaccaggcaggcagtacagatacaaacttaatagcgatgtgaggcacactgataaataccagaaaacattctgtaagaggggttagcattatttcactgtgtgcagaggaggtttgtccatgtggggggaccctaatgggcgtaggcatttgaagtgtagtctaagggatcttaggtaagagtgtgtttggaacacagtgtacgtatttatacagcaaatgctctgtgtggctataatttaggaaaatttgtaggacttgaggacagcttatttttctactagctgacagaggcttgggtttgcttctgctttaagtataagtatctcgagtccttttttaaaaaggaaaatcaaggaaatagttggaattgggtttcacataaaaaacattttagaaaagaaggggagtatgagagttaggatttgctaatgtttgctgtattagcaaattatttgcaatgcttgtcatattagcaatacatgtatgttttggaaaacacatgcaaattaagcagcttaaggaacttttatctttatttcctatgtaagatttgagatgctgcaaagaaaatattaaaacattgaaccgatacttacagtagtcctcctatatctgcagaggataacttccaagacccccagtgaatgcccgaaaccttagatagtaccaaacccaatatatactatgtttttttcctataggtacatacctgtgataaagttgaatttacaaattaggcacagtaagtaattcacaacaactaataatagaatagagcaattatgacactacgccaccatcactactcttgcactttggggccgttattaagtcaaataagagttacttgaacacaagcgctgtgatgaagtgatcaatggcaggtagcatgtacagcatggagacgctggacaaagggatgattcactttctggactgtgtgggtttgagatttcatcacactgctcagaatggtgcgcaatttaaaacttattgttggctgggcatggtggctcatgcctgtaatcctggtactttgggaggccaggacaggaggatctcttgaggccaggagtttgagaccagcctgggcaacataggatgaccctatctctttcttaaaattaaatataggccgggcacggtggctcacgcctgtaatcccaacactttgggaggccaaggcgggtggatcacaaggtcaggagattgagagcatcctggccaacatggtgaaaccctgtctttactgaaaatacaaaaattagccgggtgtggtagtgggtgcctgtagtcccagctactcaggaggctgaggcaggagaatcgcttgaacctgggagatggaggttacagtgagctgagattgcaccactgcactgcaacctgggcgacagagtgagagtccatctcaaaaaaaaaataaattaattaaataaatagaaaaataaaactcatttatttatagagctttctatttaatatttttggactgaaactatggaaagcaaaaccacagataagggaggactactatagttatgataaaaatcaggaacttaatctagccacgagaacatttgtatttctgatgaaatttttattcttgtctaaaatgttgaactatatttatatttatatctttaaatataaatgaactatatttatatctttataaatgagctatatatttatattttatataaatataaatatttttatatctatgtaaacataaaaaggctttttttcctctctggatgtttactggggttatttaataaaaacctagggatgatattgggaatttttgttggaattttaaattttaacgtgtttgtttctttttttgttttgtttcgttgtttgctttctgagctgggagttggctgtgcatgtggcagttgctttatcaaaagggtcttgctctgcttcagaagaagttttgttaccttgattgctaatgttctcccccttaaataaacctcctgatgttggaacagcaaaattgcattatgtttggaaaatctaaattaataatcccttatctctgaataaaagtaactgaatcaggttgaatttactgcttccattttaataggacagtaggaaaaaactatgcatgggctttatgtggttcaaatttttttttttttttttttgagaccgagtctcgctctgtcaccaggctggagtgcagtggtgtgatctcagctcactgcaacatccgcttcctgggttcctgcgattctcctgcctcagcctccggagtagctgggacttaacaggcgtgtgccatgacgcccagctaatttttgtatttttagtagagacagggtttcaccatgttggccaggatggtcttgatctcttgacctcgtgagccgcccgcctcggcctcccaaagtgctgggattacaggtgtgtgccactgtctccggcctggttcaaattttgtaatctccacatccatctgcatattaacaattgtcattgttggtgttatagagagagaagctgaagcacagaaaataacacgcatgttctagatttcctggtgggaactggaagtaaattctgtgtttggctgatcactgtataaagttctagtactagtctttagggaaaagccccgtcttcatggattttaatttgtcaatttgcaattctacctacttggaaatagtcaacctaatcagttactgccctgttgcaccaactattaccataggaatctgaagatggtatgcaaccaacatgaaaaagagatccttttctcctggtaatcagtttgtaccctacaaacaattcgttggttttaagttgtatagagggaaccatgatgtgaatatgcctgccactgggtttatagaaaaccgatgactcctgaggaaattctcagcagggttgtctttcagtgaaaagaaccctttagaaagatgcagtaactcacactttactgcacataaagtcatgtccctcagggtggactctcaggtgtcatacagtttatgactcatgagtgctgcagctttgtgatctaataaacaagtaaagacggtgggagaattatattcctgtacaaaaagccacttcacctttcattatataggaaaaaagccatgggaatattaaatttttagtggcatttttagagcattttctgtgatctaaagtgcctgcattgagatattaagatacttaagaacaaagtaaaataaagagaagtattaatagcaggatccctttggagctaggttactgtggcagtggtttcaagaataactctctcagcacccaccccaggattctgatttagagatttctttgtgtgttctcttagcatatacctctaccactgagtttatcccctgctgctacactgattgataccttatttttaaatttttgtttttaaaatagacggttttttagagcagttttagattcacagaaaagttgagaggaaggtacagaggtttcccatatacttgctacctgcacacatgcttagcctctcctattataaacatcccccacagaatggtacatttgttacaatcgatgaaccaacattgatacatcattagcacccaaagtccatagtttccctgagggttcactcttggcggtatacattttttgggtttggacaaatgtataatgacatatgtccatcattgtagtaccatacagagtagtttcactgccctaaaaatcttctgtgctctatctgttcatcctccccctgcccccaaccacccaaacccgtggcaaccactgatctttttagtctccatagttctgccttttccagaatgtcatatagtgggaagaatgtcatatagtatggagcctattcagatgggcttctttcacttagcaatattagttaagttcctccatgtcttttcatgggttcatagcccatttccttttagtgttgaatgacattccattttctaggtgtgtaccccacagtgttatttattcattcacagtaccttattttttaactgatttttttggggtctgggactaaggtgaggtaaacaaggcagtcaggaattgagattaagaatttttaatgtaatatttttaaaaatcaaaattactgcaaaaaaactccatgatgaacaaaatatcaactttttagacagagattgagtcacgctcaattgacatcaagccatgcatagttctcctactgccttattaaaatggaagcagtaaattcagcctgattcagttacttttattcaaagataagggattattaatttagatttgtcaagccctctgaatgtcatggacaattgtgagtgaaattccgtgtatcgtctaactccccatggatgttatcttgctcagaaaccttgttctccctccaaggaaggcactacttctcctgtagccttctcaggtcgaagttcttttctcaaaatcctcacagcgttgcccctagaggtgggaatgtcctcttttcctcttcatttcctcttttcctcttcatttttgtttccaaaccactcttcctttctcttccctaaaagcccccctacctcagcttgaagtgcatgctttcagacaaatcactttgctcctccacctgttggtcatctccagacctctttctacctcatcgatgttcaccattcagactttgaagattttagctcctgccttgctgtcatcaggtgtagctgcttcatttgctgattcttaagtgatcctaatattgatctcaatgatccttccagtattccaatttgtcagttcatgattctcatccctccagtgaccttgttttcatcattctccatcacccattgcttacaatggtcatattatactccttgcaatgaccaatcactgcaactcctccaaaattttaatttcaattatttgactctccaagtactacttattaccacctcactttctccagtcctgtgcgccatacattctttagcccctggagtgtgatcagtggactcagattccactggtccctaccaccttttacctgtgtctaattcccctcatgttctcacttttgccacttgagattgcatggcccagcattctaatcattcccttgcttataccgtcacttctctattcgttgttatttatctggcaaaacaaccaccctgttgcaatgcaaggtttatgcaagggaatgcacattttcgaaatagatttttatgtttatgtttttctttcaaatctctactcattaataaatagaagtggtttgatatttcacaaatgtgatttaattgatcaagtttcacatttcattctaagtgctcagttaaacaccatgatgtattcacaacagtaatcaaagcaaggggctgtagttagttataggagcaaagagaattcatgagtttatttttatctaaatgacacccttgataacttttcgataagttattttcatgtaaattacttggaataagagcaggatttttatatagaaagctttctatgtgtcatatcctgtaaaatgtttgtccgattagtgagagatagggggaggttgaattttactaaacataatatccccagccatatctactgtaacgtttgtttaggacattacagactattatcctacaccaatttatttcacatcaaaaatcaccccatgcttgtaagaatcctcctttccccctcttgtttctattttagctcccctggaaaaataatattttaagtctaaatgagtacaataaattaaaaagttgcattgcttaatattttgaatggaatagctagatgcttgttcatttgctatctttttctttgtactgaatttctttagcttggtcagaggtagagcaggcttgactcttagtggatagtggtataggttgagtatcccaaatttaaaaatccagagtccgaaatgctcaaaaacccaaaactatttgcatgtcaacatgatgctcaaaggaaatgctcattggagtattttggattttggactttccggattccagatgctcaaccagtaagtatataatgcagatgttctaaaatcggaaaaagtcagagaccttgaaagcacttctggtcccaagcattttggataagggacactccacctgtaccttacagtggaggcttgttagatgcttgtaaatgccagcccctgcctcaagtaacaattgattctttttgtgtgctctcccaggtctaccctgaactgcagatcaccaatgtggtagaagccaaccaaccagtgaccatccagaactggtgcaagcggggccgcaagcagtgcaagacccatccccactttgtgattccctaccgctgcttaggtgagccggccggccgtggggctggtgttgattgggggcctggtcttgagggaagaaaaagaggatgctcctgttaggtcacatacacagacttgttcttcagcacattgccactctgtgttgtactgtgttttggactcttgcagttacattctgtgcactgaccctataggagcagtatttttgagttccctgcctcagaatgaatttacccagggtgtatattgaaattacaaattcctgggccagttccaggactcctgaatgaaaaatgcctatagtagcggatccgggaattcttattttaccgtatcgcatagatgattctcatgaacaggggccttgtgtgtttcttcacatagactttctagaagaaagaatctaatgtgaagctgcagcattttgttaatttctaaaaaaaaaaaaaaaaaaaaaaaaaaggctgttctacaataactactcctcttatttggtgatagtagaggaattggaattgggaaggctttttttctgcttacatcaaactggaggaaacagtctgattactaatgtttaatgtttgttttgtcacaaacctcaaatttacctcaacattttatttaaaaaaattgagtagttttatgtggtatcgtgctcttttcctctggaaactgtcatactccatatttaatctaacttggttattagtctgttcctagttgttgtttttatgtgaccagtcattgcagaagtcaagttctttgctctggtatcttacatctagatgttttccacaagtgtattcatcagtaggcaggttgtaaataaggatatagagattgtctgtggagattgtggacaaatattgatgtatattctgatgacttcttataaaggttaaaaggaatatttcaaagaaaatccaacagcaaacttacaaagtaaggatatttactgaagattccggagatctatgtaatatatggtcaaaaatgaatgtcctaagagcatactgattgctgttcattcatgtgcataatttgagacataaaatgaaaacactgggcattagaaagaagatttcacctggtgaatttacttacaatgtaattgatgaagagagtgtagaaaactagatttcttaaacatctgataattcaagagtttcctttttcctccttattccttgttcctatatgctttataaggcctcaactcttttctggttcatcaaaaagtgcagtttaattagatgaaaataagcagcacttaaattctagatacagaactcctactcaaaaaaatatagaagtcatctgtccccaggaactgtgtattttatactcacttagttattacaccaagaaataacacacagagattgaacaattcagtacaagttaggaagtagatcatgagtctgttaatttgatgggccaggctttgttaatgatttgtttcttttggttcttacttacctgttctatgaagtattccaaatatattttcattagaatgtaagctcactgagaacaggtagggctttggatgggcattattgctcctggtatgacactcaaaactgcagtcatgtttcagaagtgaacttatcattttacatagatttttctgcttcatattctattcagaatgatttgtattaaagttgatggaaagatgaaatccacattaagattgttatttactacctagtgccagttgttgtagcaaatatcctttgaaccccaggtctattttatcctatctgttgatcacttcctttgcccctgctcttcaagcctcctcatctctgaaaagctctccttccactgggtgtggtggctcaagcctataatcccagcactgtaagaggccgaggtgggaagattgcttgagcccagcagttagagaccagcctgggcaacataatgagaccccgtctcttaaaaaaacaaaaacaaacaaaaaaacctccaagtgaacgaacagtacaacaagtaataaaggatataaaagatgttctcagatctcaatatcaagtcagaagattttataataatattataattacacggagactgtccaaatatttgtatttgttgtgctacactgcattatgcaccatttagggaaacaacagcctaagtaatgtggttttaaataattaatctcatctaccaaatacctgtttgatagtaaagttaatgacctgtcctcaccttatgtttttaaccattatggaaagagaaccacttgaaaatatatcattccactgacagataattacccagctgtgaagcacaggctggagactggcaaggagaaatggagagaagcctataaaataattctttctcagggaaggagtttattcctgccaaggctttgccatcaaccattatcagatttctctttcatcctccgaacagattctgggctcctttgatgtggaggtacataattcaaaaagttgggtcacttgtgacatgttaagcaaatttctcagttctggttgtgtctgatgtgaaatgagcacgttgacactaactgttcttgactactatgggactagataatcatttgctatttcctgtaggtacttggcgtgttgaatcattttaccatattttctcattttatgaatcactggtccttttccattggacctgaaattagaccctaatatgacaagtagagcatatgttgtctcttactttgttattaaccttagattagaattaaggaatataggtgctgcttttttcttaggtagtggcaaattttccaaaggtctcaagcccagagtataatacagagttgataaaataacctggtagagtatgtagagcatgccttgtctttcaggaaaaggaactgaaaaacataggttttccaataggtgtaacataggtaacatagggacataggtgtaactgatgtacattttacttgcacttaatagacaggcagtgttagttcttcgtctctcttcacaggctatacaactaccaagatccagagaggttgaatttcttgctataactcacagcaaataaatgggagagtcagcactacagtccaagctctcttgattattggtccagtgttttttacagtatacacaaaaatttgttttaaaacaaatattcactatgaattagagacaatagcactaaaaaagaaactcacagctatcgttgtgttgacagaggagacaaccatgacctagtataggataaatctccatgtgatatgttttctactttatagtagtagtaggtaacattcttacatattattcctgcttaacaaagaattactgttcagcattaacataagtatgctctaaaatctcttgactgtatccaaatatatgttttagacaagagttttttttttttactgacctagcaaacaaaataaaattatcttaaacattaagcgtgttaaaattcaaaacaaagcttgaagagagaaaaatgcttgttatgtgtggcatacaaccttcctaacctctttatcagatgaaggatccagtgtggcactggattatttttctgtaatattttgcctcggacatatgtgctatacatttcttgtctgcatggggaaagtatgtcaggttgctgttgccactttcttcccatggagtggataatttcccttgagaataagttggctttctcatctcaccctttgcttttggtagtacctctggaaccagagggtaagattcatcttaatcatgtgaacattttattaattatctcatgtgtgattcaagcacatcattactgttactcaaggagaatattttctttgcaaagctttcaaccctttccatttgaatgactgctcttcatggtgtaatagatccactgttgaaattggcacttttctgtacttgtctctgaccagcaaaggcaaggaacattgcgtaaaataaattactgttgaattattggggcaaagtcaggttaatagcttaatccaaaaaaggaattacaagtgaaagaattttaccttaaatgtcattctgtttcattttgtaattaagaccttccaaatgtgtaagtagtaatgaccagaaatcttatcagatatggtcaaatgagaaaggtattcaattcatattaattttgaattttattgttttaatacaattttaggaaaagcatgccttgttttctgggtttcttggctgcctttgtatcaattatctacagctatcttctttagcatggaaaggatgtatttgaatactgtgacattttataccagggtaattctttgaatttatgtaaacaacaactctcttgagacacatcagtacaacacaatagtcagaaatgtcacatgagagttcaccaaactttaaagatggcgatgaggatggaaaaacatttttattgtagactttaaggatcttgtaaatccccgtatgtaatccagtgtgctagagaattggtgcccatggcgcctcctctccccaccgacctgcactgtggaaatcctactaattttgaagtcatgggagatgcatgtgtgggacctatacatgcactgtgatgagaatgatgacttcatcattctcattatttaatgagcccagctgctgcatacaagaaggatgcaaattcttgaatgttcttgattgtttacatcatggtctcataaggaatgaccagaattgctgggcatttcttcatcaggaaaggctaatcagccatccttggagagacatcagactcctttatatgtggccttcccatgggacctttgaatggtcaacgttaatcatgcttcagaaccagcatactaagtaaaagaaaacatgtccggaaaagaaatcttatcagtgtttatctcccaacagtgggattacaggtgattttgattttatttaagcaattttctatgactttgtataataaatgagtagcttttataatcagcaaaagatagactatgaaatcagtacatataattttgtatttgtatgtagtaccattgaaggataatagaaaaaagtcaaaagacttgaaagtcgacacagaatgatcattaatttgttttatctcttggtagttgtactttatgagctttatacatacagtatgggaaaatacactttagttttgaaaacaccatgatgccaaaataaaagaaaataacgttcattcatacgatcttcaacaaaatttaagcagcattaatcatcactgattcttcaggaagattcttgatcttccttaattttttttccctccaaaattgcatatggcagccacatttgtttcaggccagaaggaagaatgggaagagcttacatttatctcacagattccttctgggtgaggaagacttagaaagtgaagccctcttccatttgattaagcaagaacacctataaaaatggtgtcttcggccgggcgcggtgctcacgcctgtaatcccagaacttcgggaggccgagatgggcggatcgcaaggtcaggagattgagactgtcttggctaacaacggtgaaaccccgtctctactaaaaatacaaaaaaattagccaggcgtggtgcgggcgcctgtaatcccagctactcgggaggctgaggcaggagaatggcgtgaacccgggaggcggagcttgccgtgagccgagatcgcgccactgcgctccagcctgggggacagagcgagactcagtctcaaaaaaaaaaaaaaaaaaaaaaaaaaaaatggagcccttctaggtaggtcatcctccatggctcactgcagcacttccttggccctgtcccaagttccataattgcctcaattgcattggctcctgcttgatttgctttctaaaactcaggacagaggatgagttgaggagactgacttttttaacaatcgcattttgaaaagaaggaagcgtagtggtgtttcttggctccgtttccagttttgtttcttttcattttaattattgtacctggtattgtgtcctctttctgggacttttaacaactaatgttttgattgataagagctctaatagcatgggtgatttatacttcattacatcttcagttttgtcttctttactggagttgtattcaggtgtcattaagtaacgaggcattaaaaagaaacgataacttttgaaaaactgctgttatggcttatgagtgggctttgctgatattttcttgaagcacagaatttatctatctctgtaggtcctagatgataggtgagaaaaagaaacccagcttatttggcatgatattgtcccaaggcttgttagtaattgctttgaaaaatgaatagcaaggctaatggacatctgatttgtagtacatgctaagaattgcaaatgtgtgctcaaaagaaatttctctgattacaaaagtaacatatattcaacgtacaaagttgagaaaatacaaccactagctaaaaataatcaaaaccatttggcttccttgcagtctacatttttttcatgtatgttttgcttttgtttttagtgttatttaatcgtttcctgttttgtgacttgctttttacacctaacatttttagaatactctacctgtgaaattaaatattcttggagagcataatttttaatgtagcatcacaccagacactgtaatgtgtttactcttttttatggtcatttaggtggttttctttattttgtggtggtgtaatagttgttataaatgatgctgtgataaacatcctggtagataaatttgtgtttagttgatttttatataacagttattggcggaatgccttgcaaatcttatagttggtgtaataaaatatatgcgccacataattgtttatgaaaatatggaggaaaattttaatactgatttatgatcctgagtttaacataagcatggatacccctacatttagctatgatttttttattgatagagtaaaagcgcctgtaatttctacttaaggccatttaaaataattactatttaaatctatttaaacaattttaaatattgcttttccaaatttccaccttaggaagtagttaattgaatattctcagagaaataagtcctacaaaattgaccaataaaaggtcagttacgtattcattgtgtacgttttattgatcacccacagtgtgtgagcccctggaggtgggtgaaatgtgggcctccctcttacagagttgatagtgggcctgaaggggatgggatttcagctcaggaatttaaggaagacttgacaggaagtagcattgtgagccaagatttcaaggataagatttcaaggcaagaaaggagatgtattttaggtattcagacagagggtcaacaaagtctttaaggtaggaactagttcacttttcaaaaagaagaggtaattggtcatgataagagtagtagtttttaaaaatcattactgttttcattcatttataatgaatactattattttataattttaaagtttatatccaaataattgttttcaagatggtaatgaatgtatattgcttttatgtatacacatagtactttttgctttttggtaactaagtttataatttttgagggcaggaaatatttttgtttttcacttacaaagaaactatattttaataagagttttttgacagcagtgctttatgccaaaggaaaataaagcaacatttaacatatcaaagaaagccaatgcaaaacaaggattatttatttatttatttattttattcatttttgagatggagtttcactcttgttgccccggctggagtgcaatggcgtgatctcggctcactgcaacctccacttcctgggatcaagcgattctcctgcctcggcctcctgagtagctgggattactggcacccgccaccacgcccagctaattttttgtctttttagtagagatggggtttcatcatgttggccaggttggtctcaaactcctgacctcaggtgatccacccatcttggcctcccaaagtcctgggattacagacatgagccatcatgcccagccaaaacaaggattttatattcaatcaaactgacattcagatatgatcacatgaaataaatatcaacgtacaataactcagggcatattttcacattattttcctgtagaatctgctagagaacaagtttcagatacccaaaatacctagagaaaaactgatataaggatgggtaatgagcattaaggagaaacataaaaactaagactcaacgatggtaaaaagtatgataatatagtattccacagctacatgctgtgacaataaagagattctgtaactgtcaggcctctgagcccaagctaaaccatcccctgtgacctgcacgtattcgcccagatggcccgaagcaagtgaagaatcacaaaagaagtgaaaatggcctgttcctgccttaactgatgacattccaccacaaaagaagtgaaaatggccggtccttgccttaagtgatgacattatcttgtgaaattccttcttctggctcatcctggctcaaaaactcccccactgagcaccctgtgacccccacccctgccccccagagaacaaccccctttgactgcaattttcctttacctacccgaatcttacaaaatggccctaccccatctccctttcctgactctttttcggactcagcctgcctgcacccaggtgaaataaacagccttgttgtgacagtaactttaatggggaagaatgagaagaagatgtgggtaaagaaacaactgtttttctattaatggtggtagtattagtgtgtaattctgagcctggtgcataagtaatatggtgtaacataagtgaatagttgtgtgatattttaattcaatcatcccatgtatttgagaatcagaattttgatgtggtaaaagaagattcacatgtaacatataatctattaaaaagataccctgtagtcatgagtttgacttttaggtatcatttctcagtataacatattgttgtagatttcagataacattttttccccataaatactgtccgctgcaggcctaaaaataatgaaaaggcctaaaagaccaactcagtagcggtaaacaccagtactgcacctagattatggtctttaggaaccattttccagtaaaagataccagtaatctttggaaagcaggatttttttttctttttttttttttttgagatagagtctagcttcgtcgcccaggctggagtgcagtggtgcgatcttggctcactgcaacctctgcctcctgagttcaagccattctctgcctcagcctaccgagtagctgggattacaggtgcctgccaccactactggctaatttttttttgtatttttagtagagacggaatttgaccaccttggccagtctggtcttgaactcctgacctcgtgatccacccgcctcagcctcccaaagtactgagattacaggcatgagccaccacaacccggcggaaagcaggaaattttttaaaagctattttaattcagtcatgtaaaaaaaatgagcagaaagaaacaaaaaacttaaaaaaaaacttaaaaaatgagcagaatcttaggaatcacctgcgactttggttattcatgcttagccatttctataggaaattccagcactatttgagttagaccactaattatatgtgtgttgtagctttctccaagagataatggaattcacaaatcaaaactttgagattattaagtgttacaagtgaattataaccccagtcatttgctttcaaatgaacagctaaacatattttgtgttaatttcttatggatgctgctttgtttgtttgtttgtttattgagacggaatttcactcctgtcacctaggctgaagtgcaatggtgagatctcggctcactgcaacctctgcctcccgggttcaagtgattctcctgcctcagcctcccgagtagctgggattacaggcgtgcaccaccacacctagcagatttttgtatttttaatagagacagggtttcaccatgttggccaggctggtttcgaacttctgacctcaggtgatccacccaccttggtctcccaaaatgctgggattacaggcgtgagccaccattcccggcctagataggcttttagttggtttccatatacagtgtatatagggagaaacagactaagacagacactggcatccacagaagtaaaaataaaaagtaaggtataatttaaatttcacacggtcatggtcacatttttcagctttttgcacctatgttgtataaaaaagacaaaaatgcctttagaggctcaagttttcaggacttcctgaagctgtgtcatagtttaaaaatgccataaaaatgccgtcagatttaataacgtatcagctgaacactggatttctgttatgttgagtcttcaaaaatttctccctgtatgaggaattaatactgttatgtctgatctggtggtctgaaatgtgaacttttctgggccaaccagtaaacagctgctgttgctttatagctgcgtaattcagtcttggaaattattagataattcccacaccatttcagcttgctgttttaccataaatttaatgtgaacagtatttctagctaacctcaagctgtgtttattgtcgtggaattttctcttttattctgaggtaaatgattacaaatggttatgatgaggaatcaaagaagaaagtggactttcttcaaagttctttttctactctagccgcttctgagcatctttctcaagcactgtgtttccatcagtccctaccccaagcagagaaaggaaacagttttcccctttgtcttcagaaccctcttctcatcgtgtcattttccaaagcaaataaaaatcttgagatattgtcttgagtttgattttttttttttttttttgagatggagtttcactctttgttgcccaggctggagtgcaatggcacaatctcagctcaccccaacctccgcctcctgggttcaagtgattctcctgcctaagcctgccaagtagctgggattacaggcatgtgccaccatgcccagctatttttctgtttttagtagagacggggtttctccgtgttggtcaggctggtctcgagctcccgacctcaggtgatccgcgcctcggcctcccaaagtgctgggattacaggcgtgagccaccacaccctgccgagtttgatgttttttttaaccattcaagccagtaaataactttccagacagctgtagtagaaaacagaatttgtgtgtgacaaaacttaagattttgggattgagagctctatggtttatgccatgtggataattgtagccagatgaagaatatgaaatttaaggaagtgtttagagtggtacagacagctattattacgattcttggggtagaagagtagcttacatacaacataaaataatggcattaactgaattaacttcagcctttgccatgaaacccaagctttcattatgttttaaataatgaactacattaaaaatagtatataaatatgtaaaatatattagacatagacttctcataataaattatgggaacttttgatgtatttcttccctaggaaaagaactaaacaagtgcttctttgtggacttaaaatttttcagtttactattgtgaattaggtacagcatatctttataattccagataatacccataaaagcagaactgtttatttacttattatgaagggaatactgaaatgaaattaaggacaatttttttctcacgtattatatttttaaaaagttatttgatgtttgtgattaaataaagaatgaatttttaaagccagttctcaattagcactgaggaaaagaatatgctttttttcaggtacacaaataagcatcatggatataagaaacgacataaagatgaatctacagtctggattaagacgtattttaatttcagtgtcaaaggctgttaggaaatattcagattttagtacttgacaaagaaggttctcaatatttgtttcagtgttcagtgaaaggataaattctgtcgtctttctcttttatcatattagtcactgagtggtttcattaaacattccctcttccatatcccctgataaatttcaacttgttggtgatgcatcccaggagtgtctgtctttttttttttttttttttccttctcctgtcagtgagtcttaggctttggctttgaaaccctatagtgaagggaaatctcaggcaacagctgtgcaaccgtctggagagcagctagtccagattggaggagacgaacgaggctggtcgcaggagagaggcctccaggaaaaaatggcattgatgcattacctgcgttaaagattttcctgtacttagcatgcttcttagggttctactggagcgtttgggaaagatacagtattgatggatgcatagaaaatgaggcaaattttttaaatggggcaaatattaactgtagacaaagaaaagccaaaagtacaaaataacagcgttgtaagatacgaagataaaaatacgcctaagtatgagcgttctggcagactcacaatacagatgccatatatggggtaaaaccataccagtaggatggtgggaagggaaaggggtgggctcatgttccatagtgggaagacctacagcggaaaaatcaggagaatagttatttaagcacagagtttagggagtaagttgcagaagagacaactaaatgagatggccgtgaatgatttttatgacctcctcttgttatggagaaatcgatcaaggaggcctatatttgatggcaggaagaagttgagtttaaggtttccagacatttgttttaatctggaaaatttctttttttctttctttcttttttttttttttttgagacagagtctcactctgtcgcccaggctggagcgcagtggcgcagtcttggctcatcgcagcctccgcctcctgggttcacgccattctcctgtctcagcctcttgagtagctgggactacaggcgcccacaaccacgcccggctaattttttgtatttttagtggagactgggtttcatcgtgttagccaggatggtctccatctcctgatctcgtgatccgcccacctcggcctcccaaagtgccgggattacaggcgtgagccactgcgcccagcctaaaatttcttttaagcttagaagttgcaagtcaagttactgttaaaggcgtcctaactttgaattagataaagctaaactgtggtttaattgagctgagtttgttgtatgctatatctcaacttcacaagatgtttgctttttcttggctataacctaagattatacaaatataaaattacctttatgcccatttgatagactttagggctgaatttccctgtgtaagatgttgtagaggtttgtacttgtgattgtttttactctagaagcatgtttatcttcactcctttagtgacacgtgtttgttcaggaacttcaaactcaatgtgatcaaaactagactcatgttccctgaatagtctctcctgactacaaatctgttggaaacttccaatcctaattaataattgtaaactttttaatgtaagtcatatgaggggttgttgtgagcataggaggtagggagatggtagtgtgagctggagcatatggtaaaagttgtttgaaagaaagtagacccatgatgtggatcctgagggatacgtaaagaaaatgaagaggtgtagatttaaaaatgtttatggggcctgggcgtggtagctcacacctgtaatcccagcactttgggaggccgaggtgggcagatcacctgaggttaggagttggagaccagcctggccaacatagtgaaaccccgtctctactaaaagtacaaaaattagccaggcatggtgatgggcgcctgtaatcccagctactcaggaggctgaggcaggagaatcacttgaaaccgggaagcggagattgcagtgagccgagatcgcgccactgcacgccagcctggatgacaagagcgaaactccgtctcaaaaaaaattaaacaataaataaataaatatattcatggggatgttccagggaaagtagtttgtgttggtagccttgagaaataataatagaaaattagaatagaactaagttggttcattaaagttggaacacttgtagagatttttgatttggacagacattaattcatttgattatttctcttattcgatgtccagaaaaatatctgtacattcaatgtggttttatttgtactgcacatgtcattaataggctaaagttacctctaagatacctgctttcttagtccttgttacgctgtaaattctgggcatcaggatatagctttttattatgttagctcttttaatagatgatacaattggattggggaaaaaactgattatactctggagtaatactttcatagcctgtagtatcctgcaaatagctcctggtcatcttcgaattttactagcaaacttgtagggtaataggttgggacaaagtattataatcagtggctttgagggcctgataagaggaaacaataattgtgcagctatattgtgaataagtagtgcatgatgctgatggttaaccctttcctgcggtgctcaaacattgggaaataattgctttttgttcaaaatgtaagctcttcgataattgagacttttgtcaattcactgaaatattcccagagcttgaacatgtctggtacatagtacatatttaataaatatatagatttaatgaatgaattgaggatgtagccaaatattggaaaaggaaagggaaaagaaagaatagcccaaacattagaaagacagaagatgtggagcagcaatttcacatgcctaaaagaatttctgagattatggcaaaatcatttactttacttactccttattgatcaacaaaggaagagcaggttttatgtaacaaccaagaagtaacatagggatctcagaagagaagaaaccaagtgtctttggatcttaataaaaagaacattcaactccagaaatagggttaaacctatcctacacatgtctagtaaaaagtcagtgtatcagaggcatctgtgtttagagataaaacataccattagattcatttataatagtttcattgtccttagtttttaaggctaatgataaagatttttttttttttgtgagacacagtctctctgtcacccaggctggagtgcagtgacgcaatctctgctcactgcaacctccgcctcccgggttcaagcgattctcttgcctcagccacccaagtagctaggactacaggcacacgccatcatgcctggctaatttttgtatttttagtagagagggggtttcaccatgttgcccacgatggtctcgatctcctgacctcaacagatctgcccgcctcggcctagtgctggaattacaggcgtgagccaccacgcctggccttaagaattaattttcacagaaatctgcttctaaatattattcagtgataatagattttagaaatttcagattcttatgttgtaccttaaaggttaggatactatttataaatgctaaacatgaactcctgtcatcctattttaatgtctttattaagtgattacatgaatgtggcgtttcagtaggtgtttggtgtattaatagatgtaggtactcccctcttaaacctttaagtattttcatgccatgaaaaatttggggggcattctctttatttattgattaggtacctgtattttcaagaatattactcagcttcagttcccccaaatcttttttagtgttaactaccttccgagaacgtggtataacattttaaaatatattttttgaaggtttggatgtcactgaagatccccctatttattggatggtatctttatcagctgggaagataattagtttcccaatgttgctatatttttatgaataggtcctgtagctcttgctttcttgaaagcttagaattgattgtaagccatggactaatgatattctccaagcatatttaacatgaataggctcatgttcagtatgtcaagaagttaccctgttgtactatttaaataatttgagcttagttttctttttccacctttgttctaaattcttaggtgagtctgaattcctgggcatctgtgcacacagcttcttcagtaggtcctttactctcattgtatctgatctttgacttcataaagacccttggcctactgaccctgtatttaatttcacatctcaatagtatttagccttctcatatttttcctcttctttagagctccctgatccctcactccagtcattcaactctgtgtattcctttaacttccaccctcgctctgtctcttcacagatatgcttctttatatggtagtcagaagttcctgtgtgatcttcgtaacctccagttccctccacagtcacctgttatcaggcatctgttccttgagctccagggaatgagctctttgctatcattctggttgtcggactcactgggcactgttgtgtcctccacagtctctcagtggcatcggttgatgggtgcattctccccacactgatgtcattctgctgcttctgattttctttctgctgtcctccattttcctttcaggctcccttccccgtcctccccgcgccaccttttgcaatatttaggattcagaaattccaaatattgcaaaatatttagaatcagaattcagaaattctaaatatcagtgtttaataggagtaccctggggttgtccattttctcacacaacacatacttgctaggagatctcataagtgcagtggtttttcagaggcctgcattgatgattcctgagtcattatgtccaggccaggcctcatacatactatttactggttctctttctgcgggtgctccaccaagaattcagactcaatggaatatttcttctaagatgtacaccagttccttatcaaaaaatggcaaattcagacttcttaggttaaacagagaactcgtgaacatggcatatgtctgttattccatttttctctgttggcttattgctgagtaccatttgggataaaaatctgtttcaggcaaaggataggattgttttcagcttttattaaattctcctagacccttgattttatgcagagaactaattaaatttgaatgaatttaatgtagaaaccctgctattgatgcagaaatcaacctgattctggactagcaccagaatcaactatttttgttgtttttgctttctttttttttgcttttgctttctctgccggtaaataacaactagtatgtaagaatcaaatgaatcaagcataaatccctaggaaatatttatgcattcatttttaacaatttaaagatgtgaagatatataattaagcataatcctctcaaagtttgacgttgaaaagtatttcagatacttcaacttaaatatattttttgcaaaatatcttttttaaaaaaacagatgtggtctcagcaatgtaattattacagtgtgaggagagcttacagttgtaccaaaatttataactaggaagaagagaatgtgaaataatccggaaacctacaaaactgtcctatacaggaataccaattaaacagctactaaaaatgagtgtaaaatgacaatatggctttatcaagtgcttagggtctggaaaaatgcacatattgcctgttatttattgttatacttaatgaatgttcttttgcacgtgagaactgttataaaagatgtcttttgtacatacttggtacaccagttggctttttaacccattagctgttttcccccaaaggtggcctactctagatgacgttaaaaatacacattttccagggacttatataaatagtcaactgccctattatggaaacttaaaagcgaaggccctgaaatatccagacagtttgaacataaaccaaaaatgaagtgaatctctagaattgctgtgtaatagcgtgagtggggagggggtccctcaagagagggaactgacctttttcttcctcgtgggtgaccttgagtacacactttatttagtcattaaaagggtcacctgaagcttagagaatgaagatcctacagcctgttaattttatcattgttagaaactctctgcctttggcctgaaaatggtaaatcacctttcttagaagattctcatatccagatattcttaccaaatcagaatcttttccagcattttcttcaaaaaaccacagttctgggttaaaacacagcagatcctaactgtaattttcctttcatgtacattttagtcatctttataattttaaatgaaagacaggaactacattatttgaaataagggttaaccccctctaattataagcattaatcacacacagttttctcatttctaaatgttaaatataaaatgggagctatctcttcagacacttttctgttgccttctgtgtgcggcaggaccttacttttaagcttagtttgatttaaaggctgagtttctgcttgcttggaatgcttgctcttcaaaatatttgctccctggagagggaaactgaagatggagctttcacgtgactttggattgctgacctggaagacgtttggggtaataggatgggctagggcatggttccactgctttctgtttgagtggggtcaggaaaggaaggcggggctcgctgtgtgcaaacaggaaaacatagtctgaagatgtttgaagcctgagtgcactttcatttgatgccttgctttattgcttaagagaattttaaactgccgaatccgcaaatgtgctgcagcctataatgacacatatttaaatgatttttgcatctaaacaaatgcattcactctttgcctggtgtgtacaatttgaatgacactcgtgctctgcctggaaggaacagacgtttttcattataaaattcagtcaagcagaaaagtagcaaaggaagcagaaatttccatttacatctatgattgaagttgtagtgataaaagaggatgactaagttgaagagtagccttgttctcattctgctatctgacatgggatcttgtcactttggtaatagtttttaaacttacattattgaggaaggctctgatcagaagtctcaaattatacatgttcttcaaccttagatttttctgggtgttttgtttcaaaagtctcaaattatatatgttcttcaaccttagatttttctgggtgttttgtttggttttttggttatctatagatagatttgagtatctctttttttcttaaaatccgttacttactagtaataaagacttaagtggtagctttacgctccattatcacagagattcacagtactttttagtttttacttgtgagcctcagcaggtgtagacagataccttagttgccactgataacatccagttgccactagatcaagaaatggttcaaaattctccaggggcattttctgctaaagaagagttggtgatcttccttttggaagccttaatgtacttaaaccttcttccttagaagtccagaaattcaattatttcagctctctgtggagtgataagtcctgccaaattgatttacaataatgaaactaagccttgtttacaaatctaagtggtgatttctaagtccacagaggcgtggtaacagagagagagattctgatttatctgggggtctatccgtgtttgaacagattgtgtgatttttgaaacatgattcaaaagggatgttgataaattctaaaatacatttttattgaagagcttgatgaatcatgtatacttactttatttgttattctattagatattgtcttcctcatccctaggtggtgttgctagtacagtgacagaattcaaatccttctttttcctctgctctaacagagctttgtgaactcatagcaatattgtaatgcctggtaaaaggtggtgccagtttcaagtactatatcctaattacttcatggctaactcttgttattgttaacaatattgttaactcttttgttaaatgcagtgacatcttttttctttctcattctctgtgtactttttgccctaaatagttctgcatcttttaagatacaagtttgctttttcttggaggtttttatttggaaaatgcctgaaatatatagaccaacatttgttcctccaatggttaaattacattgtctcccaaagtgaggcattttaagtctggactatacccaggagaatctaaaagaggcagttaataagctcttgaagagcacagtggggtggttgtgtatttattgagtctcacacttaggagagaaataggctggaccaaatgagcctgggcatcaaaagcatgtgggtggtcgttggtgatatgtgcagtgatgagtgtgtgtgctgagggtcctagaccaggctggcagggaaatgaactgaaggcagtgaagcctcccctgataactgcagagagtgctgcagcatccaggacctcaggatcatgatgaacaagctgtagtggatggaagggagaggaactatgggaaggatgagtttctggccagaaagtggtttactggagtgctgtgtctgagtattacatgatctgaggaccatgaggtccagctttgggagtatggagagtttgagtggagtagagttatagtcccatggtcttctgattcacagacattcatgagcgataagtatctattgagaaagtggaagcatgatttttatgacctcctcttgttgtggggaaatcgatcaacggggcctatattggttgggttctacaaccaaatagaatgtgttcagcaggagtcatgttttgggctcctcacaatgttcagtgttagttctgttcctttctcttgcttccacataggaaagactttgacccaatgaggaattagtcattgtcctttgggtacacttccggaatttgataatcagttgggcacttgattctagtacatttgctaaaagtaattaataccctgcaattggaagcatgcagcaagcgactgggaatgctaagtgaaaggtcagaattgaaagagtggaggaggctgttgacccttaggcatggatgatatgtctgagtgagaaagcaagaagagtagaagacagagccttactttataatcagaattatgaaaagaggagccaatgagagggaaagaatgattggcttgagatagattggtggaaactggagaagattgaatttaaagaagaaaagtgggccaagttcagtggcccatgcctagaatcccagcaaattgggaggctgaagctaggagagttgcttgaggccaggagtttgagatcagcttgggcaacgtggcgagacccctgtctctacaaaaaataattaaaaaaaaaattagccaggcatgttggcatgtgccggtagtcccggctacttggaaggctgagacaggaaggttgtctgagcccaggaggctgcagtgagctatgatcacagcactgcactccagcctggttgacagagggtatccccgtctctttaaaaaaaaaaaaaaaaagagaatgtggcagagtagtcagagaactggagggctgagaagagactgatggcatttgttgttcttgaccttgaaagaagagttgcagattgttggagcaaggccagatggtaataggttggaaagaacaagtgaggggcgtgagagtgacagtctacaaccccgttaagaagttatctgtgaaaatgcctcttcctgtcttgattatagcctccctcgcacatggctttctgagtatggtatgtgaaaacagcatgctgtatatttttaccttcccatatgagttaaggttttggtaatgacttgtggttcttttgcctcacggaacaccaacctggttggtattttgtcggcaattatgtggtttttaaaaagccccgtatataaccttaattaattgcgtctctaaaatctatcaggctttgagttttttgttttttttttttaaataaggcagaaagaaaggaaagtgttaggagaaagcaaccagtgagaatacctatattttgaagaaacaaagtagggaatttagaattatctctactatatctgctttttcagctcatctctcgggatacagaggactgaactaagctaaagtaggttcaagtctaaaggaaaccttaaattaatttctgtattagaattaatcacacacctataaatacaatttatgatatgagaactgcaacaagagaaatggggggagatgagcagtttgctgatcaatagggttaatgatggtaacatagaatcctagtgatatgcctcccattgactaaaatgtatgcgttaagatagcatagcgcataaaatggtgtactgcagtctcagtgtattcaagcttattatggtttctctgcctaggtttgtgtctttggctttagattttctcccataaccccaacctgtccacattcaagtcactactccttgaaatatattattgatctctaaaatctgatgctaagtctgtcttgcccaacggtggccactagccacccatggccattgaatatttgaaacctggctagtccaaactatgctgtgagtataaaaaacccaccagatattaaaaagttagtctgggagaaaaaaacaaatgtagaatgtcttaatgataattatttacattgattgcatgttgaaatgatgaaatttaggatgtactgggttaaaatatattaataaaattaattttacctgtttctttttacctttttatgttaatgtggctacaggaaattttaaattagatatgtggcctctattatatttctgtgagacaaagctgctccaagctgttttggtccagaactatatctcggttcttttgtatcctacatggacctgcatagaatggtatttagtaatactcagcagtagcagagatgatctcttatcaaattatgttaagttttaatttttattcttgtctctcaccctatgtgcacctctctggccaggaggcatttatcatatcaccttttaatatttggaaatcacttgatctgcttgagtcattgtgttgttttcaaatctagaactctttctaccttattttgtaacttctataattaaacaaaaggcgaaccaggagcagcttggctcttagggatgtgtgaaaaggcgctcagtccttaagttggtgccaaaagtgacaaatctataggatgagatgcaggtttatggaagagaagcatgaaaatttttattttttaaaaggacacagcaagctagtcaccaaaagacagatacttgattctacttatatgcggtacctttttgaatttgaagagtcaaattcaaaaagatggaaaacagaatggtggtttccaggttctggaggtgggggaatggggagtggaggtgggggaatggggagtggaggtgggggaatggggagttgtttaatggtgtgcagggttttagtttagcaagatgaaaacagttctggagatggaaggtagtgatggttgtacaacgatatgaatctacttaacactaaactgtataattaaaagtgggtaagcaaagagtgtcttacaaagcaataacttgtaacttaaaatttttaaaaaccttaatgagattagttgtaatgggttatcttaagtagacccttactgccggaaggaacagctgaatcacatcacttgggagcttgttagaaaagcagactcagtcccaccctagacttgtccaatcaaaacctgcattttaacaaggcccccaggtgattcataggcactgtaaagcttgagaagccctgctccaaatatcatttctcaaagtgtgatccatgagccacctgaagcagagccaccctgggaaggtctgttttcaggcgcgtcccagaacacgtaaatcagatctaggctgtggagctagggagaagatgaatctgcagactgatcaggatcccaggtgattttgaagcatggtttgagtttgaaaacccctaatctggaaagctttaacaactattactcttacaattccatcttttaacgaatgttggaattattaaatacttgtaacaagaagtcctgttattgataaaatcaagatatgactaatagtgcagtcaaaaagaggcaacaaaaaagcacctataacttatcttgggttggttaatgaggaagctgtcattcaaaattagtaagactactgtaacatttcttggggtcctgaacattggaatgagagtcggttttcagagttgagcccacctctgtcattagctttgtgcaaacctcatcaggctcaagattcctcatttgtaaaggggaatgaattctctgaccagttagtttacattcctaagacaaggttaaatttggaaagcaaagaattttcggtatatatgtgataattttgaaattcttgaatttttaaaaaatttaaatgccacattacttatatttttttctaaaaaaaagtcaaaccaagcgctgtctagttattaatagataccacagatgagatgcctgagttggtaagctctttttaattctagttcttttcaactacaataattttatagacttttttttgaaggctagaatgttgatgtggaatcaaataggtatgcctctatgtatggtagatgcacctgacagggatcacttgacttgaacatgccctgacaatgatcctgtgtggcaggtgcacctgattctgagttctgagttaagaaatccgggagtgggccgggcggggtggccggtgcctgtaatcccagcactttgggaggccgaggcaggtggatcatttgaggtcggaagtccaagaccagcctggccaatgtggcaaaaccccgtctctactaaaaatacaaaaaccagctgggcgtggtggcgcaggcctgtagtcccagctactttggaggctgaggcaggagaattgcttgaacccgggaggtggaggttgcagtgagccaagatcacgccagtgcactccagcctgggcgacagaatgagactctgtttcaaacaacagcaacaacaaaacccaaaacaaaaaaacaacaacaaagaaatccaggagtggctaacccagagagccattccttatctgtaaggaacatctgagccctcatctccttctgtggaacatgggcctcgccggggattgagaccctttgttatgagttaagtggaagttgccaggtggagattgttagggggagggtgttaaatgagaatgctgtagagaccacatgccttttgcaagcggctgcggttcctctgtccaacccaccaccactggactctctaccctgtatgcaagcccccagtaaaaccctatgagacatacggttcactagctctgggcctcttctggctcttgaacctggtgccatccacattgcagtcagtaggagtttggcatgacaccttattatgtgaacttttatatcaagccattaaatttttttaaaatagactttatattttacaacagttttaaatttacaggaaaattgagaggatagtccagagagttcccataggctttgcatccagttttccctattgttaacatcttatattaatatggtacatttgttgcagtcagtaaaccaattttgatacatggttattaactaaagtctatactttattcagatgtccttagtttttgtctaatgtcctttctgtgttccaggatgccatccaggaaggcgcattatatttaattgtcaggtctccatagcctcctttcctcttggctatgacagtttctttatacttctctagttttttaataaccttaaaggttttgtattggtcagataatttgtaggattcccctctgtgggaattttctcatgctttgcctggggttattggttttaagaaggaagaccacagaggtaaaatgcccatttcatcacatcatatcaagggtacgtgtttatcaacatgatacagccctgttggcattgaccttgatcacctggctcaggtggtggttgttgagtttctccacttgaaaattactcgtcttcccactttatgtgctctactctttggaaggaagtcagtttgcacagcccacaattaaggagcagagaattatgcttcattttcttgagggcagagtatctacataaattatttggaattcttctgcgcaggagatttgtctcttttttcctatttatgtattcattcattcagtcatttagactcatggatatttacattgtactttgatttctaatccagcactacttcataatttttattgctcaaattattccggctttagctattagaagccctttcacttggttcctatgctcatttgacatagcctcttttttttttttcttacaagatgctgcagtctcatcttgcatattttcagccctaatcctagaatcagctgttcctccaaggagcccttgttccttttattggagagtaatgttattggagaatagtattaaaatctggatgttaaggatgctcgttgccactggagtttctttgcttttaagacttctcagttgatagagcaaggcaatgtatttgtccatgttcacccttatgttatgcagatctataaatatttctatagctaactagttgtatttatattaagctataatatctagtctatattaagctaaatacaagttcatccggatgtttcctactctaacgtattaccacatggacactatatctctcctccttggttatgtataaattctcactccatccaccatctatgtacttaattgttcagtttcagtatatgtgcgtagccgtatcagaattgttaacccaggctgggtacagtggctcatgcctgtaatcccaatactttgggaggctgaggcaggtggattgcttgagcccaggaatttgagaccagcctgggcaacatggcataaccccatgtctactaaaaatacaaaaaaattgctggtcatggtagcatgtgcctgtagtcccagctacccgagaagctgaggtgggaggatcacctgagcccaggaagtcaaggctgcagtgagctgtgatcgtgccattgcactccagcctgggagacagagtaagactctttcttaaaaaaataaaaaataaaaaatataaaaaaatttgttaacccacacctatatggatctttttaaaagctgcaagactgctaacaaatatttatttatttatttatttatttatttatttgagacagagtctccctctgtcacccaggctggagtgcaatgacacaatctcagcccactgcaacctctgcttccccggctcaggcgattctcctgccccagcctcccgagtagctaagattacaggcacccgccaccatgcccagctaattttgtatttttagtagagacggggtttcaccatgttagccaggctggtctcgaactcctgacctcaggtgatccacttgcctcggcctcccaaattgctgggattataggtgtgagccaccatgcctggccataaatacttattttgttcccgtggttttttttttcttttctcttttttaaagtaaatcctttgcactatttttattattttaagaccagtgttattcagagcctgggttaaacactattctgtgtgtgtgtgtgtgtgtgtgtgtgtgtttgtttgtttgtttgttttttgagacagagtctcgctctgtcacccatgctggagtgcagtggtgtgatcttggctcactgcaacctccgcctccctggttcgggagattcttcggcctcagcctcccgagtagctgggactataggtgcgcgccaacatgctcagctaatttttgtatttttagtagagacggagtgtcaccatattggccaggctggtttcaaactcctgaccttgtgatccacctcggcctcccaaagtgctgggattacaggcatgagccaccactcccggccagcactattctgtcttatactcactctgccatctgtgtgtgtatatggtacgtatgtgaggctggatctgtgcacttggaaaagttggagagatgatttaggtaaaacttttagttttcacttcttttgcctttttgcttatcttgatccatttagttcctaccatctggcaaatagttctcatctgaagaatcccatctgtcagttctcactattatccggtaatagttacagtgaaatgctggtgacggcaacagccactttttaaaaggatgtgtaattcaccctcatgtcctctttgagaacccagtaactgcccacactctgaagctaaaaccataacagttttatcacatggaaagtttgttgagaaatgtttggctgtttctgtgaagtaatcgtcccgtctcttgagtacagatgcctcccaggaaaattttcccagcctatttgttaatgtgaaagttacaaaagatagcatataatgagcacattcaagacaaaaaaatttgtggagtaagagtctgaaatggtaaaataaaaaatcacttaagaaaacatttatctgtagctgtcattttcatatacacatatctagtgtatacaagttagtaagtacataattctcaaaagttctacctgtctacacatctacacagaaaaattaggaaagtcttgtccagacttttccatcatcttcagtataaagcatcttctagctgttggaatagaaacaagctagattcttgactcctttctatttgattatttagatctgaccttcagacgacatccagaatctgagaacacgcaccacctctactgctctcatcctggtccaagtcattgtcatctcccacctggattaatgccagagcccccttcctggtcttctcacttctagtcttgaccccctagggcaagaataattagcttagaaaaccaccccagagccttccagcattactctgagtactggccagagttggacaatgtttaaggccccgtgcagtcagctgtccctgtcctgtcctggctgtcactcactcgcttgcccactgatctcttccacatcattcctccacgacagcactgatctccttgttcttctgtgagttcaccaggcatgcatctgcctcaagactttgtgtaatacttgttgcttcctctggctagaatattcttccctttgattctgaatactttgttccctcacttcctcaagtcttcactgaaatgtcatattttcaagtaggcattccctgaccaccctatttaaaatttcacccctcagaaaaaacaaacaaaccacccctttctctgctttatctatgtaacatttattaccatccaacagacactgtatttttatctgtattttttatcgcttccccgctaggatcatatatcgttttatctgttttgttcactgctgtattcttagcactgagacataattgtaagtatgcagtgaagagttagtggataaaggacagtggctgcaagaggggatttaggaaacaccccctcccagccaggaccagcactcggtgcaagagttgaaagagttgatcactcagattctctgcttctccagtcgtagggactccaccccgctgtgttgattgctgtcatgtattcaccccatcataagcagtactcacatgtaaaacagtaccatgtcatctctgtggggctacaagtaggtggtgatggtgcaatgaacatataaaaccccagtgtcttcagtaggtgcgaaataggtgattagtgaatgatgaagagtagctgttgctgttttgattactatgattattattatgagaaactactgtggttgatgagatagatactggggagaaggatactattaatataatttattgagcaactttgttctgggcactagttgagtactttagggatattaattcatttaattctcccagttctgccatttactctctatgtgacctggactgttacatagtctctcagtctcaccctctctttttttttttttttttttttttttttttttttgagacggagtctcgctctttcgctcagtctggactgcagtggtgctatcttggctcactgcaacctccacctcccaggttcaagcgattctcctgcctcagcctactgagtagctgggattacaggcatgcaccaccacgcctggctaatttttttgtatttttagtagagacggggtttcaccatattagccagactggtctcgaactcctgaccttgtgatccacccgtctcggcctcccaaagtgctgggattacagacttgagccactgtgcccggcccttgccttctcttataaagtgaaatcattgtagctgctttggtgtggttctgaggacggtgagagaagacgcacgtgaagtattgagggtggtggcaggcacacagttcagagttactaacaatactggtgttttatcttcacaaggcagatctgggcccatagcacaaggaaaccgaggctttggcattttacagtaattacattgccagaacatttcccccactttcttgaatcatctttacctcttgagagatgaggaagagagggcacacctcgggcagaagtccaaagacctcaggcatttttggcctttcattcccatgattctggccaacatcattttagtccccagcagttcatagaaatattgtcttttaatctgatattcaaataatctgtgccttgaagaacctgtgtatggctctagaatcttttacattaatctactcaaccccactctgatgctcaaaacttcagcagtctgttttttttttattttaatgtctttattattatttttttttttgagacggagtctcgctctgtcgcccaggctggagtgcagtggcgcgatctcggctcactgcaagctccgcctcccgggttcacgccattctcctgcctcagcctcccgagtagctgggactacaggcgcccgctaccacgcccggctaattttttgtatttttagtagagacggggtttcaccgtgttagccaggatggtctcgatctcctgaccttgtgatccgcccgcctcggcctcccaaagtgctgggattacaggcgtgagccaccgcgcccggcctaatgtctttattttaaacatttatttttagaggtagggtctctctaagttatgcaggctggcctcaaattcctgggctcaagtgatcctcccaccacagcctcccaagtagctgggatgacacccccaggtgccgccatcctggcagcagagtcagttttgatacatctttcccttctcattcttcccaatgtcatggattgggaagttactgtggttttagttgcagtactttttactctgaattctgtttgcttcctggaattctgtctgtcttttgaaaagacaacataaagaaatcgaaaaatatactttaaattccatagtgtgggagcctctgctactcgcctgtttgatattcattcccattttttcctttctaaaagaattccagattttttttgttcagggtgacaatgtgctctgctgaaaatactttcacagattcccttgcaggtgcatgtgaccagatcacagtaatggcacatatggcctcagtggaatttgctgaggagtatgtccctcccaagtaacagcaaagctttattagaggaaaaaacaacaacagaaaacctttcacctttgtcttgtttctcctgccttctgtctggaacttggacacagagtcttgaatttctgtgaccataaaacacgaggataaaaccaacgtgctcaggatggcagtacagaaagataggaatacgctggtccctgatggcatcatggaatatctgcagtggccctagcttcagtgtcacttcttaggtgagatacataatcctaccgtgtgtttaagccacggtttgacatgtggtctattctctgccgctgactgcattcccagctgttctatatggcttgctagctaatttaagtctagttttattgtcaaattgaccacattgtagattataatattaaagtacttcacagtctaaaagtgaactacttttgtaaaagccaaaggaaatgggccaaatgaaccattttgaacagagtttaaatgagtgagttgagttaccactcttggatggagaactggagacctggattttcagtctagttcttctgccagttggctctgtgggcaagtcacttgacctgagctcttttcctcccatctgcaaaatgaggtaatttgagctagacagtcctcccaaagaccaccaaagagctagcagattgaggcctgcagactcctattgaatttgccatccttgttcaccttgccaagacttcatagccaagaagccagacccagattttgttcattagctttgaaaacaccctttcagttgggtgtgtgtgtgtgtgtgtgtgtgtgtggtgtgtgacatgcgttttgaatataaattgtgaattgttttagcaagaaaccaggttgtatgtttctcaataaacatgcatactgtatattgatgaatttatccacttgaaataaatggtgccaaattgcctaaagtttgctgtaaacaggaacatgatttctcattatgatgtttaatttgttttagtctttgatctcttacatcagaattctgttaagaactctttttacctgaaagatcaaagcaaataagcagaagcatttataaaaataaggtatacgtggctgtggagagaaactccaggtatatacgatcataggctttttaaaattaataaactttgtttttaaaaacaaagcagtggaagttcacagcaagtttgagtagaaagtacagtttccatgtaactgctgtcctagcaaagatttttaagtacaatattttttaattaaaaagagaaaatataaaccgtgctaagccagttggtgaaaaaggcttcattatacttttagcactcttaacgcttattaaaagtttttaaaaacagatttttgtggttgaatcgcttacaatttctgatgtgtaaccttctaacatgtttcatcaaattttaaaagtaatgtaagcagtgctgtccactgctaaattttattttaatgttagaatacaatgaggtttctattttgccattagtcctgagagcttattaagtaaccagttttaatcctttaaaaaaccattctcattttgagggacacatatttcttagctttgtgcaatataagaagctaagaccatcttggcagtatcaaatgaaatgttttgcaagttagaaagttcagtaaccacttataaacataatgaacaattgttatagtcagtctaatgcagaaatacaggtgttgggggcaggggggtggtgggtgggcagacttggtccacaagtagtagtttgccaacctctgtcctaaacacaagttcaagaatatggttctcttggatagattttctgccagatgaaagtaagagtaacatccttagctaatgaactcctaatatccaaggcaacttttaattaattcaggcttttaagaaaagcttgtttaccaactcctcattaaaaatgttcagactggctggtcgtggtggctcatgtctgtaatcccggcactttgggaggctgaggcaggcagattgcttgagcctaggagttcgagaccagcctgggcaacatatctagaccctgtctctgcaaaaagtgaaataattagctgggcatgatggtgcacagctgtagtcccagctactcaggaggctgaggtgggaggattgcatgacccccggaggtcgaagctgcagtgagccattgatccaaccactacattccagccagggtgacagagtgagaccttgtctgaaaacaaacaaacaaaaagattaatgcagtacatgtccttttggtgaataagtaaatatgttttggtaactttagctttgcattataatctagtcgtcagcagattgactaagggcagataaaacaagatgatttggttttgtggtttggcacttactgtctgatttatgcccccaagaactcttgcaggccaaggtcgagtgtatctgatacctgctctggctcttctcacgaactgatttagtagctttgggccagcattagattttttaaactctttgacctatttgtacatgacaggcatttaatctttccagtagttacttgtcaaatagaaaagcatcacttcttagtttggacatttgcaaatatgactgagcagagctgacagatgaggtgggcatcttcaggccatagggtacttctggcctcctgtaacctagaaaattgggatgcctcagatatcaggtattcttccaagcagctagggttagtccctgacctcagaaaccctgagagccctcagaaaccctgagaaatccacctgggaatggtgtatttgttttggatgagattacctttactttccattctccaggtcttcttgtgttttttgtttttgttttgttttgttttgttttatatcattctatgtaaaagagaaatgtggtatcatttgcattatcatgttatttctttccttataatttatatcttaatgcttatctctggggctaggttataatctcctgagttaggtagccttaggtttcttggcggagattcctcccctgggaagtgaggtttataaaagaacccgtgatgtggccctgtggagctgcatggggtgtgtgctcagtactcactggtttcttccctgcaaagtgacacctgcagcctttggggtaccatgtctcataatttttgcattccctgcaacacacactatactgctatgggcatcattgatcattttaaagatttaaggaatgacaagatacagtgcttattctcccctatgatttgcttagatttttatctaaatagtacttattgaaataagtacttcagtatcatgctacatcttacatgtttgagctagaaacagactaaagtttaaacccttttatgagaatgaaaagttacttccttccccttcttagggcttttaatccctctttatgttgcatttcagaaaatgccctatagcgtactatgaaagaaagacattcattcctgtctttgctgctgtgtggacgatctgtattccttgctccgtgggagttgtgggtttatgtctattcttgcatgttttgcctgaaggaccacagtgacctacttggtggtctccctgctttcatggtttcactatgctgatctatccttcacttaattatagagtctatcttaaaaaaaaaaaaaaaaaaaaaaaaacttttggcctatgttgcttcttccaaaatggcatccaaaacctaagcctctttaaaattggagtccagcatgcttccccagtgctacttccttctggactccctttgccacttgctttctgcttccacccatatccagatgggctgcaaatatgccttgctggttctttactctgtctttgcacaggaggctccctcattttgaagggtcttttgctacccatccatccatccatttggattctataatagagttcttgatgtttgacagaactaggccaggaattgtgggggtataatggcaagcaagacagagtctatccttacgttatggaagttcaattcatttcccatgtggcatactacttctcaccattcagattcatctcgaatattgtttcttctttgaggtttttcccactgcacccaagatactggcctgacactttccttatctctattacagaatttaacttgttcattcattaacagatatttattgcctactatgtgcaagaatctgtgctaaaagctgggaatattgcagtaaacaaaaattaagtttacagcttacatataatgtggtaattatccatcttttaccttcattagactgagttcatgtaggactttatgtaatatctttatatcttcaataccagaaatgcctagaaataatttgcataatatacattttctttaaagatttaacaaaagtctgagggacagttttcagaataaactgaattaaactctctctctcttatgtgtgttatgtaaacatatatataaaatacacttttgggttttttgcttaggaagtagaaaaatgctaaaatttctgttacttacaagcagattaaaatgtccaagaaagaaaagtagggatttatattgattctgctcaaatgcttacctagacaatgtcaatatttatattttactcccctgttgtagtagaatggtaattggttctctagttaagcagcttttttaggattaattttgaagcaagaaattcagattaattaagggacaatttcacttgcagcatttaggcattattttaaccatcaaacttgaagtggcaagaaacggagttgcttaaggaggccagacgtaacattctaaaggtagtagggtcttgattgggttgcttaggcattaaaaggctgtttaacttgtcttgaagtctatctttccttgatgtcttctgcggtaagaacactgtgatacagatggaatgacgggaagtggttttcctttctttcagttggtgagtttgtaagtgatgcccttctcgttcctgacaagtgcaaattcttacaccaggagaggatggatgtttgcgaaactcatcttcactggcacaccgtcgccaaagaggtaccagcccataaattctttcttattgcaaagtgaagatttcctggggacgtgcttaatggcattttaggggtattttgaggcaacagctatgttgataagttatttaagaaaaaaacccagtgctactatccgtaacccagattttagtttttagagtgattttaggttcacagcaaaatcgaacagaaaatagagttcccgtgtaccccctgtccccacacatgcgcagcctccccatccatgaatatttttaaaaagtcaaaaatagggccagttgaactagattcattatgtgcctgtgccgtgtttcgcaacttaaaaatataagttgtctgtgccatgccttataacttaaaaatataatctctaatagttataactttaaagtttacccttcagattatttttatgcacctgttgttttcttttgtcatatacaattttttaataatttagccttttcccctgttatctattagtgaatacagtggtagaacagtgaagtagcttttttataccagcctgaaagctccagttagaattcagtttctcagttataccatccagttttatattcagcaggccatgcctaccatcttgatttttccacagggtgagtctgaccgagcacttggttaacctctgcttttggctaagccaataaaagatgtaagatacttagcatgaaaaggtcactgtgtggtaagaccaccttcacagctgctgtgtccccttgataggtttcctaataaatttatataggtttatttgtggcaagatcagtcttaggctaactagaattaggctcctttatctagctcatagtgcttcacttgagtcaattttgatcccctgtccctcaccggaacatgtctggagacattttttgttattacagcttgagggagtggtgttactggcatctgatagtgcccagaggccagagattctgctaaacatcctacagtcaacaggataaccacccgccacccccaagaattaggcagtccaaaacatcaatagtgctggggttgagaaatctgatctagcttagcttaaccattgtatcatagctttatagctgttagacagaaaataccactgaagatttagtattattttatgcctcttataaaatagtatatttggatccactgtagaataaaatgttttttatgtaaaaatgtgttttggaggtttaagagcttgctgagtttaagaaaacaaaccaaataatttgaagtccagctacctatttgataacctcattttttattccttctgtgttttcaaaagaaaaatcctttgtctctaagaaacggaaatgactcccataaggtcaaaatacagtctgtaatattttcattgtctacctttatgtcttgaattattcatccttcatttatcactagtggatgctctcagaactttatgctaatctagatttgtgcaaatttagcaaatcccagaaaagcaaaaagacattcaaggagaaatctctaatgactgtaagttctgattcttagtggctgcaggggataatttcttctcttcccaggattgttactctgaaagtgaaccaagagagtcagaatttctaggataaggcaggtccatgtgagataaacttccatctgtaagggaggtaggagtgagctggggatctacctggaatgcgcacaatttctggatacacgaattaagccagaaggcattaattctctggtatctgttcaccagtggagactgctacatcttatttcccaattagtttccattccagttgttcgtataaacctctattatataacatcgtggtcttattaaataaataataaacaagaataaaaagagtaccaaagtgtaacccatgctaaaaaaaatcctgttgtaaattcactcaaaaagcaaataatcttttcctttgtgaaattggttcctaatatattgggtctgcatgttgattattttatgtggagttttcttacaatgaaacacatctactctaccactcactgttttctccttacactttgtagacatgcagtgagaagagtaccaacttgcatgactacggcatgttgctgccctgcggaattgacaagttccgaggggtagagtttgtgtgttgcccactggctgaagaaagtgacaatgtggattctgctgatgcggaggaggatgactcggatgtctggtggggcggagcagacacagactatgcagatgggaggtaaggtggcctttgtgttcagcctcagagatgctgaaacatcttgtatggagtatttgtatcctgtaaattaatctttctgtttatcactgaaaaggtctctgcccactcccatcagagtctgctgttatgcaaaaatctgaactatgaatttttatggcatcctgttgaattaataatatcagtcacccatcacagagttaattttaactatttaatattaaacttgggatcaaaatcccactgataactatcataggttactggtagttctaacagggagttgaaataataatggcgttctgttttggtcattaatttaaaaatatttttaaatgctctctgggattgtcagtcattagtttaaggtgaattttcgttaaaggtttggtttgagattttgggcgttctctgtgtggatgtgtaagggtttttttttggccttttatcatttcttttccttcatagtggaagtcaaaggcattaataaatgcttgttaattttttttaactacctttgatttgttgattgtaaagaaacctattttcgcctctttttcttagggagcttagtcccgttacttcttacctgattctcattcttaactgaaggcaaacatctatattcaaatcataaaattataaaatgagaatctttgggttggaaatgccatctggttcaggcattgattttatgctgtctcatcccccgaagggtgatgattgtatcacttatcttattccttcagtattctcttagatgttccctagagctacagatttccaaacagcacattcaataggagttgtaagtttataatcggcaaactacaggatgcttgtttttttttcttttaatttctggtgtaatctgctactagggcccccatagagtttattgtctatatcagctagaacactgggaccacagtcataaactgaaggatccaggcaaactgggtcatatggttacccccaccaattacagtcttcagtgatgatgtcactatccaggttgatattcagttgaaatgctagccagctccttcctagttaccttcatttacatcccatttcagtacctgaacacagtcatgctttagactctgaaattccttagaaatagtaccataaggtttatagctttgatattcctctctgatcatgatcttccctcataatcacctccccagttcaggcttttagtccattatcctctttttccctgcctgcctttctaatcaggatggaatcaatggataaccattcttacctattccattgaacatccttgacttggctgaaacccttcacattttctaaacatatttttgtcaattctccatagctaggaaaaattaatttctttctttagttgcttctgggatttctaaagtatcaagtcatgtaaccttaccacttaattccatttcttattcatgctgtaacatcagctgggatcttaatgttactagatgcacctaattatctctgtcttgatgacctatcatcttccccatagcagttgatccagcccaacttcattctccttggttcccagcgtaactctctctcatgctctacagatgacccctccaccgtcatccattgtgaatttctgcaacatggtacctgacatttggtaggtgcccagtacgtgtttgttgaataaaccattgaattttctcctgtacttcagcaactcttgtaccttcttctatccctttgtttcctgtcttcccttttatgattatgttctgctggactctcaatcatctcctctccctttcttgcattttcagtctccctctcccccacacccccaggcttcatccaccctcctcccagataattctttcccatgtgttactatctttctactatgtgtttttaatcctgttgacagttggtaggaaatatttgatggtttattctacctgtagaaaagtccaaattctcttgcagggcattcagaagtctcttacatggcttcagcctgcattttcagccttatacatgtatgtgactctcctggcatcctaaaaccattgaccttttctttctctaggctttcattcccaccgttctgccccatctgaaatatttttcctttttttgtcaaatggggttaatgtatgataaagatatttgtcaactctaaagtgccacttcttatgacccgtcaaaatctatatatttataaatgttcacctgaaaagatgcagcctttacaagtctttacaggtgccttgctctgctatactacccttgctttacctttttcttataagaccataacttatcttccaattaattgtagtcatatctctttttatctgttagaatccaaactatagtttatgtgtctggtatgtcttgcacataggtcctcaataaatattagacaaagtaaattgtatattttaaattttttttcatagcttttggtaaggacttcatggtccacgattggatattgtagaaagcttatccagcccactgcccaggacgactttgaatgcggaccaacacaaattcataaactttcttaaaacattatgaaatttttttgcctttttttttctataggccctgttatagagcctcccatcttttagcaaagaactgtctaatacaaatgtaatgtgagccacatactttttcgttttctttttttaagatggagtctcgctctgtcacccaggctggagtgcagtggcgtgatctcggctcactgcaacctccacctcccgggttcaagcgattctcctgcctcagcctcctaagtagctgggattacagacatgtgccagcatgcccagctaatttttttttttttgtacttttagtagaggtggggtttcaccatgttggccgggctgatctcgaactcctgacctcgtcatccaccaacctcagcctcccaaagtgctgggattacaggcttgagccaccgtgcctggccttactttttcattttctaatagacagtttaaaaatagtaaaaagaaacaggtgaatttaattttaacaacattttatttaatccagtatatctgaaatatcatgtgaccaatatgaaaaatttaataagatagttcacattctttttttatgtttctttctttcgtaagaagtcttaacacttcttttaacatttaacagcacgtctcaattcatactagccacacactgtgtttgatagttacatgtggctggtgactactatatttggacagtgtagttcctggatgacttgaaatttcttatcactctttatttttccattaagacagacggtttgtataacctagtaatgttttctaaggctgagccactgaatttttattattgtttttaactattcttgtttttaaaatttaaaaaaattggtttggattcagtataattagtatatcaggtcacttgcaccattttattttttaacttcttttcctgtagccctgcaggcgggcagggcttctttcatgtggacaaaaccagaaaggtgttgcatcactgatccacacacaaggtgggctcctgccaactggcagcctccttgttccaggaaccagccctccttttgacacttgaaatgtaaaatcagaatagaagtttaacgtacctgacttaaaacatcttcaggggatgctacgtgacaattcttgaagaaggagaaacgagctaccattttcctggaaacaatatttgattcacagtattttgttgtttggtagttaatgaggcttgttttgatagaagatgagtgtttttctatcgctaatggggcatttagagaaacattccttgtaggatgagctctgttttatgacctcattgaaaaagaggtatgaaaaagaggtaaatctttaacataggcaaaacaggtagtgtttcagaaatttatgtgtaaattaccgagtatatttttctccagtgttgtaatggtcatattctcagatcacctcaaaatacctatttatgcagtctgtaatgtagcataatccagactgttactaacattatgtagcataatgttaataataataattacgtacataatgttaataatacacagactccagccatcgtgggtaagatttttttccatgggaaaattcatttggaaagctaacttgtaagactagccaggtaggcagcctagccctggaggcagagctgctcctcacctggaactgcagaatctgattgaacccagtggtccatgggggttgctgaattcgtaaagcaaatgaaatgttagaagaccctctaattgttgtagagtcacacttttcctcttgcagaggaggtactcacattttttttaagaaacaatctttaattatcgatgtattcttttaggtttaggtttgcagacactggtgagcgtgtgctgagaggtaacttgatgtatctttctggataattagatgattttttttttctatttctttgaacattttttttttaaagagctgcttaagatctggaggagtgattccttttgaccgtgtcttattttcattaagactgtataacttggaagagtttttttttttctttttctttttcttttttttttaagatgaagtttttgctcttgttgcccaggctggagtacagtggtgtgatcttggctcactgcaacctctgcctcctgggttcaaacgattctcctgactcagcttcccgagtaattgggattacaggtgttcaccaccacacccagctaatttttgtatttttagtagagacagggtttcaccatgttggccaggttagttaatgttactctctggtttggggggcagtgatatgttttggcttttttcccacccagatctcttcttgaattcccatgtgttgtggaagggactcggtgggaggcaattgaatcatgggggcaagtctttcccatgctgttcctgtgaagtgaataagtctcacgagatctgatggttttaaaaagaggggttcccctgcacaagttctctctctttgcctgctgccatacatgtaagacatgacttgctcctccttgccttccaccgtgattgtgaggcttccccagccatgtggaactgtaagtccagttaaacctctttcttctgtaaattacccagtctcaggtatgcctttatcggcaacatgcaaatgaactaatacagctcggggtggcttgtgtgggtgcgtatggccatgtatgcaggtgtgcgtgcattggaatatacaattccgtattgaacccagtttaaacttcatcagttctggtgattgctggagtgtcacatatggcaagacgtcaccttgccctctaactacaccagaaaaccaggccagcaccattgactatctagatacagtgggccgtttatattattattgtttcatatttttagattatttggtaaacaatttacagaactaagaataaaggaatagtgagaaataactattagcaattttaataagagttaacatagtaaatattttaattttacgaagaatttaaatatggtaaacccacatgtttattctgtattttcccagttttgaaggtatggatttctgaaatgagcattatcctttggaatgcagctagctgctaatcacctgccatgcacgaacctgaaatatatccgtcttacaaatactggttctacatttcaaatacatctctattaggttcatcatatttcttggtcttttttttttatacttgcaatttcatttaattattgtaaaaatttaagatatttaaaacattgacagctcataattttattgaagagagaatatagccatcttccctcaggaataaaatgttttcaagtttggatttgtaaacagctattaaaatgatcaagccagtctttttttccccctttttttctgcattatctcttctaatcaccttagagagattcctgccttgggcatttgtccacttcctaatggtatcaaataaatgtgttgcacagacataaaatgtgttgcataagcatcataaaatggcaaggaatactgtcacatcattttagcaatgatggttaatgtttttgtcacataatattgagtgatgatatccttcctgttgaatgactaagtggatgagaataccatatttcctttttattcttagaaatacattgctcagccgggcgcagtagctcacgcctgtaatcccagcactttgggaggccgaggtgggccgatcgcctgaggttgggagttcgagaccagcctgaccaacatggagaaagcccatccctactaaaaatacaaaattagctaggcgtggtggcgcatgcctgtaatcccagctactcgggaggctgaggcaggagaatcaattgaaccagggaggcagaggttgcagtgagccaagattgcaccatcacactccagcctgggcaataagagcgaaactccacctcaaaaaagaaagaaagaaagaaagaaatacattgctcacttgtcaattcttgagcttgagaaaattcatctaggatatcatgtgaaggctcatagcctaaggttttacttacgtgatcaatttcattcttcttctggtttatctaattggtaaaatgcctccttctgtcagttgttcctatttgccaatatgtggaagatgatttttgactatattcagtgagtctccagacttctttttatcatgctttttaaagagatgggacctcactctgttgcccagacttgagcgcagtggctattcactggtgtgagtatggtgcattacagctgcaaactcctgggctcaagtgatcctcatgcctcaacatcccaagtagctgggactatgcagactttttttaaaccatcttgaaagatgatgcagtactttgggaacacagcaataaaaatgtgataatttccctattgcatcacctttctaggcaattatatcattctttcatgctcatattattttgtcttctttagcacagtttttaaatagttgatggctaatgatgaaataattcttcggatgataaatattttgtaacataggaacacaatataggaaaaagatcgaggttcataccatatctcagactcatggttaagtacaagctagaatgagttttagtcgattaaatttctttttctctatgaatggataaagtgagaatatcagcccacaagtagttagaagtgctcagaactcaaaggtaaaattgtgtccaagacctgatggtattctaaaggttaacagcctatcctacttaccaagaatttacatttattatgaggcctgtacaacctgatgcaggaaaatacttggcataattttctataagttaggtagttaggtgctcaacaagtatttgagttgaatcacattggcattcacatcaaacacatacacctacgtcatcatgttaacttaaggttaatagtgtcaccaaaactaactggtctttaaaaaagaaaaactaggccaggcatggtggctcatgcctgtaatcccagcactttgggaggccgaggctggcagatctcttgatgtcaggagttcaagaccagcctggccaacatggaaaaaccccctctctactaaaaatacaaaatagccaggcatggtggcatgtgcctgtaatcccagctactggggagactgccagagaatcgcttgaacccaggaggtggaggttgcagtgagctgagatcgcaccactgcacttcagcctgggcaacagagcaagactctgtctcaaaaaaaaaagaaaagaaaagaaaagaaaaactaaggaatatcattctagacatgcagtaattaagtaaaattgcatcaggagtctaataacatagcatgatgggtcccatgtttcattatttccatgggcagaagagggatggctacattataaataaaggaaaattgtaagaataagaaaagatgaagtatgaaatatttccaactcaaaaacaaactgtatctgagcatgcagaggtacaaaatgtcacctttttcctccagtgtaatgaagggcactaaacctcttgagcatttgatatgttccagatactatattaaagtgatttttttttttaggagacaggttcttgctgtcacacatgctggagtgcagtattgcaaccatagatcagtgtaaccttgaactcctgggctcaagtgatcctcctgcctcagcctcccaaatggctaagactacaaacacattgccaccatgcctgcctaatttattttgatttatttattttttttgtagagacaggggtctcactatgttgcccagactgttttcaaactcctggcctcaagtgatcctcctgcctgggcctcccaaagtgttgagattacaggcatgagccaccacgccagaccaaggggtgaaatcttgataacaataatcaatgcagtcatcataaaacgcttgcacaggctcaatttgtaggtggcacagtgctacatctagtcaaaagcaaatttaattatggtcattgtgctctgagaacttttctcagaaaataataaccagatggtattatagatggtgcatttcacaaatacatgatttgtagttagtgaaaacttgtcattcaatcatgtaataaattatgcacatgccggtcttccacttagctagtgatgttgaaacattcatagccttacctgatgagctcaggctgtcatgagaatttatgtctattcagtactttgtctttaaaattaggtgagagagaaagagaggctgtatttgactatatatctttttatttgtatctctggagttacaagtttttgaatatataatctttcagctgcctttctgcattgcattttgagaaatgatattaaatgctcaaggaaaaaaaacctaacaactttagagggccgcaaagtgaatcatacaaaagataaattaaagctttaaatctttgccagtggatgagtcaagtaagagtggatttaatgaaatggctcatggctttgagaagcagctgtcataatgctgggttggcagcttccaggactgtgtgaggctttctgactgtctatactgaaataggagaactcatttgaaaatgacgaataggagaatagcagaaacttgcattttcttttgagggaactggctgccagttttgaggtccttatttagaaatgctcgattcctgtattgaataaacttggactacatgtatgtcaaaaagaaaagcaaaacacttttatagccttaagcagattacagatgtgtggccaaaccagtggggtctgtttttgtttccaagcaggtgatggctggaagaggagatgcctctgtagtgcagggcttgagttgctgctgtctgagctacatctggcaatgagactgtgctgcttactgagacctaatggcacaggttgccccagtaacaggatattgctgaatgagaaatactgtaggattcatttgtaagagttatttggagggttggattattcagtgctaaggatcctaagctactgatgcatggactcttttcttccctccagtatcttttaattaaactgtacaaattccctggcttaaaaatagtaggaaaagaggaagaaaatacagattcttatgattttaactggtctctggcaatagtacaccgaaacattaatttcttgttgaaaccatctggatatttgtatcttcagtgtaaaacccctaatttagataggactctccattgtgacatggaaaaataaccctttaattagttaattaattttactgtggcctcaaaatctacatattagcatatcaagccaaaaactgttggctttacttgggagccatgtggcttaaactagtaccagtaacttaccacaaggaactcagcaaaattataagtccatgtttgttttggaaggaaggcaattattacgaaaataatttagagatgttcaaactatttcctttgagtagaggtagagagtgaacaaaatctgtcccaagtgggagctaactagcttccttttttgccctccctgtttacaaagtaacacttttagtttactaggtaacatttgcagtatccccagtgtttcaatgtaaaattgtaggtggtagactaatgccacttagccaaagccatgatcacctgaatttttaatatatatttttgtatggagtgagatactgggagaacagtcttcattagcttaaactctagaatgtactgtttgtttgtttgtttgtttgtttgttttgagatagagtctcgctctgtcacccaggctgcagtgcaatggtgcaatctcagctcactgcaacctcccctcccaagttcaagtggtactcctgcctcagtctcccgaggattacaggtgcctgcttccacactcagctttttttttttttttttaatggagacggagtctcactctgttgcccaggctggagtgcagtggtgtgatttgggctcactgcaacctctgcctcccaggttcaagcgattctcctgccttagcctcccgagtcgctgggattacaggtgccaaccaccatgcctggctaatttttgtatttttagtagagacgaggtttcaccatgttggtcaggctggtctcgaattcctgacctcaagtgatccactggcctcggcctcccaaagtgctgggattacaggcataagctaccatgcccagccaagaatgtacaatatttttaaagaaatgcggtttattaccataaaatacaggttgagcatccctaatccaaaatctgaaatgccctaaaatccaaaatgttttgagcactgacatgacagcaaacgtagaaaattatgtgactttatgtgttcaatgtatacaaacttcctttctgaaacaaaaattatttaaaatgttgtataaaattgccttcaggctgtgtgtataaggtatttttgaaacataaatgaattttatgtttatacttgggtcccatctccaacatatcttatatgtatggaaatatcccaaaatttgaaaaaaatctgaaatctgaaacacttctggtcccaggcagtttggataaggattactcaatctgtaaatacagtagctcaaattgattttgtaaggcagtcaagttattatttatagtattttaatttgtattattcttttaatatagcaattcattttatatatttatataaataaattttttgcaattgagcaaattaaaaaaattaagtgcttccttcagatctacattttattttctatttgttatcaatttaataagtaaaggacacacagatcatctgattgtgttgtcagacatttgaaggtgcaactgatgaatgttcactgttgtactttgttttgtcatgtaaattgttttaaagagaagtgaatgttgagcatatagtaggccacacgtgcctgtggattggctcattgttttaggaatgtgtaattctggaaaagatttgccaagggtattcaaaagtatagtttgatattagaaattatttgaaaataatctttatagcatagcaccattttatttagatcaatagtaattcaagcagtatacataatttgctattgtaagcgtagcatataacctaagttttcttttacatttgagaccactgtttgctgttggtcgaatttggtcttccaagattttttgcttagtgacctaattgccagcctttgtgaagagctgttacttattgtcaaaccaggcagtaagggtttgcttttatctttttatcagttctttcaatgctagtagtcatgagattaatgtagttggatactaaaatgttaatacgtgttagataacaaactgggaaagagatgaatgacatcatgaaggaaagggcagtattgcacttacagtgatttcatgatgatagaactaacctgcctaaaaagacattgggtggaaacagaaaccaggtgtaatagacgcatccaagtagtcaaggaaagaaaagacttgtaagtaaataagataatctttgcttcaaaaatatcttcaaaggtttaaaatgtgctttaccctcatatataatctttttgagcctatttctttacctcaaacatggggaaaattgcaataatctgtatcacggtatttgcttccaaaacgactaattggtgtaaatgcatatcaagccggtaaagtttacagtggacttgtttaaaatgcgtagattggaattgttgggggagcaggccagcagcatgggatgttttttttgtttgtttgtttgtttaagactctgtcgcccagactggagtgcagtggcacaatctcggctcactgcaacctccgtctcctgagttcaagcaattctcctacctcagcctcccaagtagctgggattacgggtgcctgccaccacgcccagctagtttttacatttttagtagagacagggtatcaccacgttggccagactggtctcgaactcctgacctcaggtgatccgcctgcctcgggctcccaaagtgctgggattacaggcgtgagacaccgcgccagctggggtgatttttttcttagtcaaatcacttctctacccatcatctcacactgtcgaatacaaagactctccttggggctcaatgactcatctcccacctctggtttgataatcatggctattataacatgttccctttttaattagttattttaaaattattgtaggtcttgtaatcataatcaataataatacgtaatggctccttaagcacttctatcctagataaggttgagaacattattaaaattagttttggtagtaatcaagtaatgataattcttatttatgaatttaaatatgtaggagtttttttattttagggaagcaaaaaggactagaaagtatgatgtctcatgattagaaaactgctataaaaatgaaggtagaattgatttgggctgttttggacattttaaatagaaatttaaataggtattcaaatagcaaagtcattctactttaaaacttctatacttttttaggatcttcaattttatatttaaattatatttttgaaatggttttagaagaaatattgtatcttaaactctaactactaataagtaagagaagatatatcaaaggtttgatcttttatctcctagaatatactattcattcgtttcccattgtacgtcatttgaatgttaatggttagcctcaaatggttttcaacataattgtatagctactattattggaaaattggagccaaggactcatacacatatcagaagtggtaatgaagcactttggttttatgaaaatatgtttacaaggtagtcacaggatagcaatattgcatttactgtaatacaatgatggtggaactaagtgcagtggaacaggatgctgagaccacagttaccgcatctctaagtgcctcgtctagttatggtccaacctcagatataactcattggtgttgaaacacacctagcaacattttaagcatagaccgttcattaaaaggtacctttttaaaaatttttatttttaaaaattgacatgtaataattgtacacatttacagggtacacagtgatcagatcagactgatcagcatattcatctcaggcatgtatcatttctttgtgttgggaaaattcaatatcctgcttctagctgtttgagattatgtcatatattactgttaactgtagtcatcctacagtgctgtagagcactagaacttattcctcttatctagctgtaatttggtatcctttaacaaatctttctctatcctcagtttctacctacccttcccagcctccatcatcctctgttctactctttacgtctatgaaatcaacattttctagcttctgcatatgagagcatgtggtgtttaactttctgtttttggcttatttcacttaacatatgtcctccagttccatccatgttgcttcaaatgacaggattttattcttttgtatggcttaatagtatttcattatacgtgcatgcacgcacggacacacacacatacacacacacacacacatcacattttcttcatccattagtctctttggacatctaggttattccatatcttggctattgtgagtagtgctgcagtaaatatgggagtgcagatacctcttttaatatactgatttctcttcctttagataaatgcccagtagtgggattgctggatcgtatggtagctctatttttagttttttgaggaatctccatactatcctcaaatggttgtactagaacagagcttttttaccttccttccatttgggaatcttcttacccaacatgtatattagtaacttggctatgtatgttccattctctgtctcaaatactgtgtctaggacatctgcaatctttggctatgaccacgactgtaaagtgcatgacgcttttgctctgtcatcagtattagttgacaggcaagtaagatagtacttctcttcataacccctttacctgcccagcagaataccagtacagacagacccagaatatctctgggctcaagaatccagacatttataggatgggacttttatctataaatcaccttaagattagtaagttcttagaattggttacctttgccatttctcagaagccctttgtctagtaacctgtgtgtcactgtcatttccagcctgtctttcctacacattgtttatgcaggctttaggagtgcccaccccccagttctaccccccacccccaccctagcctttgtggttttaattatcctgtcttggctgattttgttttgttttgacatttcatccattaaattcctgacactggctatctctttacaattattatactatttttctttctggctcgctcttcctgattgctgtaatccatgcccttgactttaaataccatttgtaagtagactaggccaaggtttatttctctaggccagactctacctagttatttcataggcatatgaatcctaacatgtccaaatgagagttcttaattcccctgctacccagtcctcaatgtggttctctcaaagctattctatctcagtaatggtcctatgccctctcctagggattattgctgagaacctagaactcatcatcgtctcttctgcacatcctatgaattctggatttatccacttatctccatcttttccagcactaatctaaactcccattgtttcttgctggagttatttccgtatcctgctaatctctgctctcgttctctctccctgacacatgcgctgctttcttctcccacaccaagccattctctgtacagcagccaggatgtagagtgtttatttacataaagcagatcctggaacccccaaatttaagttgtgttcgtggcttaccaatacgcttaaaaaccaagtgcacagagagaaaacaatgaagccttatttggatatgctgaggataattgataacgggtaacaactaacaaacacgtagttggtgtcaggtttgacctcctacattccttacaggtattagtgtatttgacccagctcctccctacctccgcagtatcaccccatgcctctctttcccccgactctcccctgctcagtgtcacacaagtcaatatccccagcttgctaacccccgggctgacagatctcattgtctataatggatgttccaaggtcccaccttcagcctcagttttgttgccatctttccagaatgaattcccttgatcattctgttttttggagacaaggtcctgctctgtcacctaggctggagtgcagtggcatgatcatggctcactgtagccttgacctccctggctctggagatcctcctgagtagctgggactacaggctgcacctggctaatttttttttaatttttagtggagacaagatctcactttgttgcccaggcttgtctcaaactcctgaactcaagcagtcctcccacctccgtctcccagagtgctagaattacaggcatgagccaccatgcctggccctgatcattcttttctgaagaaaacaccccttcttcattattctcaatcctagcagcctatttacttccattctgaaatgaatcacattttagtattttattggttcgttgtcgttctctccccccatagaatgtaatctctctgagtacagggagcttatctttttcccttttggagcctcggatccagcagaatgccagacacttagcagccactagcatttgatgagtgaatggcttttcatacacaattttagacattgttcctgattggtctctctagtcaataatagatttatcaaatctaatcgataatagatttctttttcttttctttttttctttttctttttctttttttttttgagaagtcttgctctgtcgcccaggctggagtgcagtggcatgatcttggctcactgcaggctctgcctcccaggttcacgccattctcctgcctcagcctcccaagtaactgggactataggcgcccgccaccatgcccagctattttttgtgttttagtagagatggggtttcactgtgttagccaggatggtctcgatctcctgtcctcaagatccgcccgcctcagcctcccagagtgctgggattacaggcctgagccaccgtgcctggccgatagtagatttcttttattgattagagagactaatcagcaacaatgttttaaaattctcacatagatctctgaatgggaaagcagtcttgaattatgcttgcagggagagagaggggaaggaaggaggaggaatggtataattagacttcataaggctagattttgtttctacttaaataatggtatcacagtgggacatattatccatgcagaaagtgagtgggcatctggtctattatctgtggtctttcaggaatggcagctctttagtttaaaaaacaacaaagtgcagcactgtttatttaatggaaatagaaaagcagtgcctgtgtattagtggctcagatttttttgttctttgttttcagctgtctgctgtatgcctctccagcggggtcttacagaatctcaagtctaccatgatcaaagctgaacccattagctccatttcttaattcctcctgtatcctctgttaccattagtaactattctccaactcaaagcatcagattcctcctcttactcactcccttcatccccagtcaccagttctgtgctgttattttatccaagttctcagtaggcttcacgagcaccgccttcacatcccaactgtcgctcctccacctatctgtcctccatgcttctgctagctcatgtttgttgcaatacaactaaccttgccactcttctgcttcaggcttttctactaggctctgcatctagatgatggtccagactcctcagcctgtgaaacaaagcccttcataaaagagcagagctacagctagtcagctcccttcctgcagtccaccccctcctccaccatactgagaattggcaattcctgtagcactctttgtatgagtccattttcacactgctataaagatataaccaagactgggtagtttataaaggaaagaggtttaattgactcacagttctgcatggctgaggaggcctcaggaaacttacaatcatggcagaaggggaagcaaacacatccttcttcataaggcggcaggaaagagaagagcgaggagcagagtgggaacagccccttataaaactgtcagatctcctgagaactccctcactgtcacgagaacagcatggggaaaccactcccatgatccaattccgtcccaccaggtctttctctagacacatggggattatgaggattacaattcaagatgagatttgagtgaggacacagccaaaccatatcactcttcatctgctacgggtgccattccctgtttctacagtgtcctgtttgctaccttctttgtagatttctattcattcatcatgtcccagtttacctgttacctcttcaacagattattcttcagtctgtccctcccaaactccaccaatgaacattctttgttcagcccattattgttaatatgcacttcactgaaaacactgttttatgcttgtttacatcccatctctgcagggctctgagcctatagtcagcagttgggaacttactaggcatagcgcccagtaaaggatagctctttatatatatatatatattttttttttttctaaaataataagccccaagaaaaacattacctgtgaaaaacaaatgatatttttataccattttcaaaacctaatagcaataaaaagaaaagaaatgtcataagtatacatttaagctgtagttaaaaacagtaaataggcacagtatttaactcttatcatgtgctgttccaagtgtgttatttacatcattggctgttcacaccatcccctgaggtggttaatatttccatcccatgttaaagatgaggaaaccaagtcacagcagcctaagtgacatgttcatagtcacattggagctggcaggtggcagcactgagaatgaaacccacgtggctgagctctggaaagtcaccattaatcaccacactagaccttctctctaggatctacataactagaacatacaattaactggagtatatgtaagtgtagtcgttccttgagaaaggaaaagaattcacaaatttcatagcctcatcccttgtgcatttgtggcattgtgctaggggtgtctatttgatatttgaccctacagatttctcagatgccaaccaaccacagatactttaaaaaaagatacttaatacttaccaatgcaagaaagtgggcttgttggaagaggaaaaatgttagctcactaatggaaaatcaactaaaagtcttacctctccagaacatgcttttcctaaatgttgtggctaacccaagaagctacatcatctttacctttatgatacaatttaaagtacttttctacttacttcaagccctcagagcacagaggcaagggaggccttgggctataaaccctgtagcctgagccacatggcttcttctcctggacagatacctggcatattctgccactgaggatcagtggtgcagatgtatctgttttctcctaggaatggggctccacttacgaatctggggcaggacaaggtattgctgcattttggggagcgtgctggaaggaggagcagagtttgttgtttttgcttcctgatatggactggctgtgtctccattcaaatatcaacttcaattatatctcccagaattcccacatgttgtggagggacccaggggaggtaattgattcatgggggctgatcttctctgtactattcttgcgataatgaataagtctcacaagatctcatgggtttatcaggggtttctgcttttgcttcttcctcatttttctcttgccttttcctcatttttctcttgccgccaccatgtaagaaatgcctttcacctcccgccatgattctgaggcctccccagccatgtggaactgtaagtcccattaaacctctttttctccccaatcttgggtatgtctttatcagcagcatgaaaacagactgatacacttccttaacagaaccaattattttttcccaaaaaagagggggagaagcccagaagcatgcagcttctctcttctttctaaggaataggtcttcacaaagtgcccccaaaagaaaaggaccaggcttttctcttactttgtgactttcctaggttgctttgtagccattttggacacagaccacctatagctgtgtagtagttctcatgtgtatggacacagtggaaggagatgccaggcacatagttcttgctgcattgacaccttttcagggcatcttcttttaccatcttctgtagaaactgcaacagcccggccaactaccagccccagcccacccctagctttgctgctttcattttctctgtaacacttgtcaccttgtaatgtgctagtgtaacatcgttgttttagttttcttatatctttccttccctgtagaatgtaaataccaggaaggcagggaattttgtctgctttattctctgcagcatccctagactccagagcagaccctggaactcaaatatttgttagacagccaaaggtcatatacttccaactctccacccaaaatatatatggatcacccatccttagtagcagctaaacctttggacatgaggaatttgctcgttcacagttttctggcctagcatctgattaaccaaactttttcacatatcaagaatttaaaatgactccaaaactttttatgaccttaggtgcttctccttaattctagttggttcataaagctgtcagaacaataatctgcttttgataatatatgacttttcttgcctccaagatagcctttaaaaaagcaatttagccttttactgtaattatattccaaatttaagtcttgccagaatatcattttccccctttaaacatactttttatgatgccaagatattttaaagaaaagttcagataggaagcatatttaagatgtcagtatatgtctctaaaatctaagaacatttttctacagagtccagatgataccatctcacccacaaaattaacataaatttttagtaccattggataccatgtccatattcagattctccctgagttccagaaaggtccttcacaggttatgcatttcacatcctatccggcaccagggccagcatcttacatccttaattcttaggattcagaatagcactttttatatcctgacactgacttgctgaagaagctgtaccagttttcctataaactgtccactccttggatttgtcttatatcatgtcccaggggtattgtttagattgttgctctattgctaggatattcatgttaccctaagtgtgtactgagatagcagagtaaagagagattgtcttttaaaggttctgcccaggaactgctggtttacacaaaagctgggctttagtgcttctcggatctctttgcttgtttcagtaatttttttttagaaattcactaattcactaacgtaagtggggcagggtttacaggagcatgtgttgagagaagttggtttgactttaaatggtcatttttacaatccgtatttaggccttacaggtcgcatacaatctctgtcacatattgctgtcatttttaccccctttcttttctttttataatcctttaaaaaatgcaaagcccacccttagctcacaggatgtacaagaacaagttgcgggttgcagtttgccaagacctgctctgtgccactgctgacttgccattcttggagcccactttctgttcttgtcagccaattccctttcaggtgctcaggtttccctccctcctgtcaccgggcctttgcacatgctctacccaccctgcctagtggagagctatctttggcccctggacttcattcacttcggaccttctttgggtcacatttcagtcatgcctcactagacacctggaatctctgcctcactagacacactagcactcactcttttgggtcttctggctgtatgtaattgttatcagggcagtaattttgcatttatacaggtgctgaggtcagtgtctggcctttggctacttgccttgtgagccacctttgctttccagtgtacccctagctcctggcccagtgtccagcttcccagcatccattcatgttttccctggagaccattctgtgcccagcagccagagacatcattgcaacttaaatctcattgagtcgttccagttgctgtaagaaatgtaaccgtactgggtaacactatgcctgtctgtctccaccaccagatcttatacttcctccctcatctgctactccctaagctcactggccctttgttgtttttgctgaacgtgctaatctcttcctcacacctgggcctttgcacttgctcttacccctgcctcagccatccatgcactctcttggttttgccgtgcccgacttcagcatttttagttcacatggctcttccgtggggcccttccctgaccaccctgtttgaaatgctacccatccctggcacacatctatcatagtcattcattagcaattagccccatctcctttccctatagtacttttccataattttttttcttgctcatattacacctccccaactaatagatagattccaagaaattgagtgctttatcttcactacctggaatagtactggcacttggtaaagcacagcgaatattgttgattgaattactaggggttggcttagagaggtacttaatggaatgattcaatggatgaatgaatgaatgcattgccacttttttgctcattatcatcaatttgtacatatgcctttcaactcaaatatttatccattggctaaagaaaaaaaatacctgaatccccgtgtctctgcagtttacccttcctcactgttaaaactcagtgcctgtgtaaaatttcattatattttatttacttcttattccacttgtgcattatgtggatattcctgcctcatccccacagccacctatcacttccggccaactcagatgcctctggtcgcaacaatcacttctctgttgaatttctgaagcgtttaatctgcagtatgtctgttactcatacagcagttagtgtgaattgtctcactcagaataagtattcattaaatgtgtaagaatgatgatatagcctaatttcagatcaagattgtgatttatagctcattcttaatcagctgtgtcatgactttatttatttattccttttttttttttttttgagacagagtctcactctgtcacccaggctggagtgcaatgcagcttctgcctcctgagttcaagtgattctcatgcctcagcctcccaagtagctgggattacaggcgtgcacccccacgtccagctaattttttgtatttttagtagagacggaatttcactatgttggccaggctggtctcgaactcctggccccaagtgatctgcctgcctcggccccgcaacgtgctgggattacaggcatgagccacctcctcaggcctgagtcatgaatttttggtagtccagtcatgtggttatcttcctaaagctggaggccttaaacctagggccccaggtgggcttatgcctttagctgcaagtaacaagaaacccttttcaacctttttactgatttatttagagagaagtacacataagaggtaatgcaagtaagcaaagttttttaagaccacacaactagatagccagcatccggaccagaacacagagacttgctggcccctagaatcctctctcctggcccctgccagttactggcctttcccctgagttctatttgcctgcagtttgcttgttttcatatttaattcaaatagaattaggtgatgtgtccccttgtgtttcgcttctaacagtgcctttatgcgggagaagtactggctatttcttactttgccctccctccccggaaacattttcctaatttagtagcagtaatttcaaaaactgctttcctttcggacaaactgacttatccagccattgtaccttccagtttagactctggcagtttggagagttgagacagagagaaggagaaccgtctgtttatcttcttgaaaaaaactactgtattttctctctcttctgactctgggagcctctagactcttttttcccattttcatatccacagaggaagagtctgaacctcttcctgctgagctttcccctggttggttgcatttcaggaactgacattggttgtcttccctcttccctcatcagtgcaagtaggttggatctcatgatagtccatattcacataaccatgagaatcagagctttctctctgtcatttcctccctgtttatctgtagcaagaagaaaaaagtccgtcttaacagagactgtgaaagaataaatatagactttattgttttagagcagttttaggttcacagcaaaattaggcagaaggtactgagattctcccatatactccctgttcatacacttgcacagcctctcccattatcagcgtcccccttagagcgatttgttacaatcagtgaacctacactgacaccattattatcacccaaagtccatagtttacattagcattctctcagcattgtttattctgtgagtttggaaaactgtctaatgacatgtacccaccattgtagtgtcatactgagtacttttactatcccccaaatcctctgtgttcctcctgttcgaccctctcttgcctttaacctttccaagccactgatctgttactgtctataattttgccatttctagaatgtcatatggctttcttagaaaatacaaatggtgacttttttggcatgactttaataaacagaaatgaaaattggtgtgtgaatcaaaatctttcactctgtaaagggacttatcaggcggcacctgcatgtggaattatatcaaggtcagctttagttagaaacagaaggagagtcacctttgtgatgtcatttctccttcatccaagtaaaatctcgcatgctgacacataaaattttatcatcagtgatttatttcctcgtaggaatgtccctttgaccttattaaattcagatactctggggatggtcagcattttcagatggttcccttgttctgtaaaaatgtttgttattggtgtttaaaagctgtaaaagccacccactataaattgatagccactaaagtctgcgaatgtggtatgaatgttccactatgttgccaagcgtttattttattgtgagttgttatttgattgtttgtaaggaaattgttttatgatgctcagctttatatttccataaactgttcctcccttgcaactccttaaactgtgatgagcttttcaaaacaagtccacaggacaacagtctgtccagcatttgaagaagtggtggaaaagtcatttttttcctttcagtgtttctagctgttcatgaaaactgcagttaaaagttgtaatgttgttgtgtttggcattctttgggaagatgcagcattattcaaacaaaaccgtgtgctcttgttttaaatagtgtccaaatgaataattgaattcatggacatctaaatttaattccagaaatcaaagctatggtaataagaacttggacctgagttctcttaggccaagtaatttaattccttagccggttgaactatttattacgtgtctccgttcctggttattatgccagtaaattgctcaggcagatgcagggatggatgatgggcatataattcactctttttcacggctagacacataccagaatgcagatcacactaaacagctgtttttacaaacatggtttctattcagagctttaagggccacatccaagtaataacaaagaagcctggagaaggaacctggggatacccagggtcatgttttcaccatcccacctggaaacacggtgctgtccaaaccctggatggtacacttggacatcgtcattccagtcatggttcaagatcacgtgtatacatcatgatttaaagagaatactggtttgatttttcttcctgactttccctgaattttccacttaaattggaaaacagcgctagttagtgcccatgatttgattgaataagtaagagatctcaaacacggtaaattaactgatgacatgcatcaggtcatctttctttgattcaccagtaatacaacagtgagatcctacagaaaaatgcaaaggcagaagctcagggcagctgagcaactgttaaggattcttttgaaatgtagccccacgtagtaaactttcgtgcaataatttgggcagtcaaaaaaaaaagtcagttatttcacctcatttatttctacgaggagataaaggcttccaacatctgattttcagtgccagtgttttctgtttctcttttcacctatttcgtcctagtcttgtggaaatgttacaataactgattaggattttctctgtattaacacttcatttattaacatatgagtaagttgctattaataaattattctgcttaatcagtttctttttattctttagccacatgctaaacttcttcggatgtcttcacttaatatccttacatcatatttaatcagagttagaaaggcgttccacttgggggtcatacacatttttttgaaacttttataaacgccctttatactattcttgtatcctacgtaatcagagtcaggtgttccatggggatcatacacatctttatacaacttgtgtaacacatgctttaaatcctgaggtaatcagagaattcctgccattgatggattaatctctttacatatctttccctttcactctcagcaaaactacttatggcggtcctgttagactttgaaagcctttcaggtttatggaggagtcttcctttctattgtcgtagatcatggaatcatagtgttcgcttgtctcacgtgtttggaatctgatttcctacataatgctgtgctctcactacgagtccaaggcttcctgtggctacaaatcccgggttcctatcacttttcccaatgatgagcttctccttgttggccagaatcagctctgtggtaataattcccttctgctttctccctctcgcttttttttttccttctgggtacattataatgtcagcatagcagcttttaattctattactatggtacttctcgaatagacctgtggtagttgccccagaaaggttgaaaccccctgccacatctaggtctttctcctgtattggttttgtgatctgatcaaggacatctattcctctagtcctgctaggtggtatacgataggcttttactattagatattcaaatgctgtcaaccatgcctgccttgacaggtacatgatttccacaaggatttcctaataggcctttttaattttgttctagacatgcccttcttttgccatccaaatttgcttattttttacaaactatgatgcatcagcatgtaaatgtttaataccataaatatttctgatcctcttcccaatttcactgagttactggttatctcttgccattattctcagcatattgcagtggatctcagaatattttcccctgaccaccagcatcagtattacctgggaatttgaaatgcacattctcaggccccaccaaggcctcatgattcagaaactctggagctgcattagaaactgccacaggcacctggtgatctgtgttggtttttgtttgtttttaaggagacagtgtctttgtctccctggctggaatgcagtgatgcagtcatagctcacagcagcctcgaactcctgggctcaagcaatcctcccgccccagccttctgagtagctggaactacaggtgcacaccaccatgcctggctggtttttgtttgtttttaaggaggcagtgtctttgtctccctagctggaatgcagtgatgcagtcatagctcacagcagcctcgaactcctgggctcaagcaatcctcccgccccagccttctgagtagctggaactacaggtgcacaccaccatgcctggcttttttttttttttttttttaatttttttggagacagggtctcaccgtgtggcccaggctggtctcaaactcctggcctctaggttttttcccacctcagccttccacagtgctgggattacaggcatgagccaccacatttagcaggtaggtgatctgtgtttcaataagccttccaggtgattctgatgctcactgaaatttgagaaccactgaaatatttggttttctacaaaacataagcagttagtaaccatagggtacgcaactaaatagttccagcaggcatccctgaccacagggcattgcagatttacttaagtcagtttcatcttccacctgtgtgagttccagcaggcatccctgaccacagggcattgcaggtttacttaagtcagtttcatcttccacctgtgtgagttccagcaggcatccctgaccacagggcattgcaggtttacttaagtcagtttcatcttccacctgtgtgagttccagcaggcatccctgaccacagggcattgcaggtttacttaagtcagcttcatcttccacctgtgtgtccagtttaagctctcagttgcagtttttaaaccaatttccaccagcatatactgagtatccgctaccgtgcaatgcgttgcggctcttgtatgtgcactatgagaagtaattcccataatacggcaaactcagttttgatatccaccaccccactttttataatggactacatttttcagagcagttttaggtttacaaagaattcaagcagaaactacaaaaagttccctctacctctcacttccccactccccaacagtttcccctggattaacattttgccttagtatggtacgtttgaaccaatatcgatacactattattaaccagtattcctgttttaacatgagaggcgactttttgtgtagtatagtctcttggttttgacaaatgcttaatgctgtgtatctattattacttatgacagtatcgtgcagagtagtttctaaaaatcctctctactccacctattcatcccttccccactccccctgaaccactggcaaccgctgatctttttattgtctccgtaattttcccttttccagaatgtcctgtggttagactcatggcatccccttttagcaactgcagaaactaagaactgtccccaaggataaaaatttttgcagacccactgagctgggatttatacttagacctgctgaattgaagttttgggtgtgtttcttctcaaattgccaaaattccatatggacgacttttcttttccttccctgaaatgtgtttaattgactttttctgttatttgtgtttgccttcacagtgaagacaaagtagtagaagtagcagaggaggaagaagtggctgaggtggaagaagaagaagccgatgatgacgaggacgatgaggatggtgatgaggtagaggaagaggctgaggaaccctacgaagaagccacagagagaaccaccagcattgccaccaccaccaccaccaccacagagtctgtggaagaggtggttcgaggtaatccaccatttgcttggattccccccacccccaaggaaaagaaagcgtaataccagagttggaaatatccaccctagcaccactgccttccccaatcaaaaacatgtttttttttccaaaaggcttcttatgcttgtgaaatttttttggtttaacaagcaaacaatttcaaataatgtgaaatctttattatacagtttgttttgtaccttgtatatgctgcttggcaaatcccaagttaattctacaagactccgcccaaccaggtagtcatctaatttgacaaacactgagttaggtgactccttggtattcctttggcagtgagtgtttgttatataatattgtctgttaccacctagacgatgagctccttgagggtaaggacttgattttattcagtattgcacagagtgcctggcttgtagtttcgataaatcttagttgagtgagtagttgtgattagatttcattaaagaaggagatttgggccaggcacagtgcctcacacctgtaatcccagcactttgggaggccgaggcaggcggatcacctgaggccaggagttcaagaccagtctggccaacatggtgaaaacccatctctactaaaaatacaaaaatgagccaggcgtggtggcacgcacctgtaatcccagctatttgggaggctgagacaggagaattgcttgaacccaggaggcggaggttgcagtgagctgagatcacaccattgcactccagcctgggtgacagagcaagattgtctcaaaaaaaaaaaaaaaaaaaaagatttggtgagtatcgcattattttatgctatgaattttaacagaggtgatttatgttgagtttacattgttttattgggaagtacggcagtgctttcttcaagaagtaaatatagtattaatgtcttagactttctctattgaattaatgtttgtgttgcaaatattgtgaactaaaagaactaaaggtcatacttgtctccatgaaataaaaacaaacattcagttgatattaaatgaccaaatgttacagaaacgagtaaactgttggattgagttccttaaagagtatgcatttgttccttaaagagttctgcatttcatatctgccatctgcttggcagatagtaaaagatgcttctagagctagattgaatgaatatgtacttgactgaattttaatgtactgcaaatacttataaaggtcaaccacaaatgttacagcatttacaaaaagtggctttctctcactttttgctaaagtttaatgatttcagatttattgttctattagagcttaacatgggctattttgtctccctcaactatattcatagttgtcactatagtattttcttccctttgttgcattttttaccttattaaggtgtaatttacatataagtttcatttgcttttaagtatataattcagcggctttaagaaatttgccaagctgtgcaactatcaccataatctaatcttagaacattttcgtcactccagtaagatcacacatactcactcccagttaagccctctactcacctctagccccaagcaacaactaatctactttctgtctctatagatttgcccttttttggactgttattataagtgggatcatataatacatggtcttttgtgtccgacttctttcacttaacacagtatttttgaggttctacatttctttaacttgagcttttaaaattgagattattctgaattaaacactcagcgttagcttaaaatttattgaaagttttacatgttctttgaaaaaaaagaacagagtgcaagatggattaagtttatcattccctacttaatgacagtttcttactcactttagcacataagtaaatgtgctagtaaatgcgcattttgtttaaaccaccatttttcaaatactgagacatgctttctcagggtgtttttcatacaactgttaggaccaactatggcagatctggtcaaatgaacttgttagcctgatgcctgtagcagggaaggacagcttttcagggcttctcttctcgaaacctaaatgaagtgtgaatacaaattacagcagctagcagcctgcagtgggactgaaagtccttggtgaatctccatcaagctgggctgtttaatagaaccagtttagtgtcccattttacttgaaacattagattttgagcacctgcttggtacaagccattttgctaggccatgtggaatggatgatgagcacacacagaccagctaaccctagtggatgttaaaatctcttaggaaatagaagtcaaagaagtacaaagccatctgtgttgtaagaaatgtgaacacagaacctgcctccgagagtaagagggaacttctggattgatcagagaaggttccatggagagcatgacatttgaactagagccaaaagtgtgggtgggtggtgtgtctaccagtggattttgctgtagagtcatcaggactagcaaaacaaatgtggtgccatggaaaggcatatttaggagacaggattggtccaatttaagctagagcagatgtcttttaggttgggaccaaaatatagagaccttcaatgccaggctggcaaagatgggcattaactgcaggtgattaattaacaaatattaattcagaagctactgtgcgctgcagatttttccaggagacaataaagagattttgttttgatgctagtactgttgaggtaacaggtgaacaaggagtgacatcagttatgcagtacaatgagaggatgccacataaacttaggcccatattctagaacaagacaatttgcttgagataaattggtctcattatcgtctgcattagtccagttctttttgcttgagttttgcaggtagtattatttgatattaagacggaacacagagatgttgtattgttttatttcctgtagaaagacgaaggcagttaaaagaatttcataaacaaaacactccaggctaaaggcaaaaaagaaatgaaccttaaaaaataacaagttaataattttgttggcaagaagagcaacaaaagcaaccttctgaaagcaagatacctggtcattgagagatagcaactgttaatgccccagaaatagaggaatctttaatgcaggtccattcattccacctcaaactcctgaacaaaagctctaattgaggcaagtcttcctgggaaagggggcctaacagaaacatgttatggtcagttgtgcccatgcgagataatttttttgtgcttgtagctaattccagtaaagaagtagatgttttagagggtaacgttaaaggggtcagctgcaaagagtccttttcctcctcctcactgttacaaaaggtgacttgtggttcttccctaattgagagcaatggcaacgccataggtgattactcattttgtaaaactctaattacaagtaggttgcttctgtgttcaacataaaaattagaagtgacttgcaaagatgagatactgcagggaggcttacaatcttgttttcagtgttagtgtttcagtacctggaacaaaatgtgatttacagccatcctttctaagaaaattgtcatcattaccaacatattgctactgataccagtccttaatgtgcttcataaaaaactcaataatttcataacccgttaaaaccggaaagaaatggagggaagaaaaataagacacttttagcgtagtcataatcttctctgccatattgtgttagaatcgatgatacccaaatgagaagatgtctgttctctgtcactgattccagtagaataaaattattgtttaaaagtaagcacattcgctgcactccagcctgggcaacagagtgggaccctgtctcaaaaaaataaaaataaaagtgagcacacgattgcaagatctatctggttttgggggcttattgtcatctttggttgttaaaaaaatacttggatattattggttattggtctagtggaataagccattaccgatttgagtacaacagtggtgtatttagatacttgctcctaattttctgttcttcaagaagggattgtacttcagaaaccagagatatcagggtagttttgattgagccataaattctaaattctgattgaaatgggtattgtaataaatggcataatcttttatttaatctagccaattgtgccctgtccagaggaactggacatttcttccttatgttccatttattcagcaactattcgttgtacccctgctgatggctaggctctttgctactgtggaaggcatcgttggggcagagcagacagcattttacctcctgggagactggcagatttttgaagcctttgttgcagatatagattttcacggtcaccactcttgccctttaatgtaatttaaatttttttttttttttttttgacacgggattttgctatgtttcctaggctggattcaaactcctgagttcaaacctcagcctcccaagtagccgggaaaacaggcctcttgtgctttaaagcagtgattctctgtctttaaaccttgtaactatgctgtgtggtggaaattttacttccccgtttaaagccaagatctctaaggccaagaattttttttttttttttttttgagatacagtctcgctctgtcacccaggctggagtgtagtggtgcgatcttggctcactgcaagctcggcctcccgggttcacaccattctcccgcttcagcctcccgagtagctgggactacaggtgcctgccacgatgcccggctaatttttttgtatttttagtagagtcagggtttcaccatgttagccaggatggtctcgatttcctgacctcatgatctgcccaccttggcggcaccccccgccccccgccccccgccccccacaaagtgctgggaatacaggccaccatgcgtggccgaaaaaaatttttttaattggcctgggctgggcgcaatggctcatgcctataatcccagcaccttgggaggccgaggcaggcggataacgaggtcaggagattaaggccatcctggctaacacggtgaaaccccatctgtactaaagatacaaaaattagccaggtgtggtggcatgcgcctgtaatcctagctacacaggaggctgaggcaggagaatcgcttgaacctaggaggcggaggttgcagtgagctgagattgtgccactgcactccagcctgggcaacagagcgaaacttcgtctcaaaaaaagaataaaataaattgtcctgggtcacataactggttaagtgatgaaatcagaatttggacctagataggccaggatatttctgctacactcatgtcaaaattacactttttattttctttataaatacacacaaattcatttcaacctgtgttcccttgtaaatgcatatacctttgatataggcatatattcatctattattttacactgtgcatttctgaatttttagaatttttacttgaagtgatcaggctggcgctgtggctcacgcctgtaatcccagcactttgggaggctgaggtgagcagatcacctgaggtcaggagttagagaccagcctggccaacatggtgaaaccccgtcttcactaaaaatacaaaaaaattagctaggcatggtggcgcgtgcccataatcccagctactcaggtggccaaggcaggggaattgcttggacctgggatgcggaggttgcagtgagctgagattgcgccactgcactccagcctggcgacaagagcgagactccgtctcaaaaaaaaaaaatagaaaaatgatcgggggtccacaaataagagtaatgatcaagggtcagcaaattggggccaaaaatagcctgttttcctgttttctacacaaaagttttattaggcacagcccatcccatttgtttaaaaattgtctatggatgttttcatgttttggaagtagagttgaggatcgcaaaagagattgttttgcctgcaaaactgaaaacatttactatctggccttttcagtaaaccatttgctaacccctgattctcactataagacggtgactgtgaagttctttctatttcacatactgccatatcaagttgatttcttttgaggtagggtttgtttttttttggttagagatagactagtatagtgtttgagagaatttttatgaccttgggccagttaagtaacctgttttttatgtgtgtagtgtagatggtaatgttatcttgcatgtttcttgtaagaatgactttaggtaacttatgttaaacgcttaccatcatgcccagtaagtgttcaatttacaaactcaagctgtccagattcaaatctttgccttacaagctactaactgtgtaaatttgtataaatcaaataaccttgaatcctcattgcttctttttgtaaaatagggattaataagacctatccaatatttaactattttgtgaggattaaattaattaatttataggaaacactttgcataattcctggtatacagtaactgctcaattaaccttagttgctctcttagttatggttatatcatcattccgatcctccattgcatttgaaacattagcaaactaatgtttactactaatgaggaatgttaaaggtaaaccaataagttgacttttaattataaaaggcataaatgtaacctatccatatctattggtataataaagctgatatttagagagaacattatgttatgattaaaagaaacatttcttgcttaaattttttttgtgtgaatatacactgtatattgaaatatctgcacttaaattttaaatccagctgaaaattggataagatagtattagatgccactgcatttcaagatagagttttatttcttgcaggtattttaagccttgtgggagttcttctgttaagtgaacagatagagacactgatacagatggctctttcaccgtctcatgtgatgataaaagctaaaaggtttgatccgaatattgcttatattgggctaagtgattgaccttggcagaattaaattatttttcttcttctggtgacaattaatctgggagaagtaccatttgatttattgctatacatttcaccaatatccacaaggcacttgtaggtaccagacatggcattggttgctgggggcacagagataggaacaaagtggcttgctcaggttgcttctagccatatctgcattgtccttgagagggatgagtctctcaggcctgcctaggaaggaattttggcagcatggagaagagaaagtgctcagcccggaacaaaagttttcacctactatgttgcagagaagttggcgtatcagtaattataaaggaagaatagggatttactgggtgatagagcaccaaatagaatgaatgcaatacatacttgaagtaaatcagagtagcttgtattgatctcaaggggagaagaaacaaagcttagcttaattctcatgcctctgttgttacttgtttgtaatggacatgacacttacaaggtatcctataattcactaacgggatttttacttatgattaatatttaactctccacaaagcttggggtaaactgtgaacttaacttgctgtgaacccgaacatgaactcacatacttcagttggaggcctcagtagtagcatgctgtacaaaaatgaaactaaagctccagggagtatttgggaacagggcaaaagggtaatggctcctccttatagagcaagcctcaggcctttacctttgtgttttgaagatggagaggatgcacttctactctcgcccgggttgtagcatgcttgctaatgatgtcaagagaactagtgtcagcactgaccatagatgtgacaggtaacagcctgttattttgtgccccatgtcatggcagccattgattccgaggtgtttgatacacactttgatagaggcagagtgaagcaggacatggacaagcatctttccgtgtagtttaatggtctcaatctagaaagcccactcagataattaggttgcttaaaatgtgatgagactagggaatagagccatatagaagtgtgtgtgagagagaattcagtggtttagtatattcacaaagatacacatttgacaccagcctgggcaacatagtgagaacctggctttaccaattaaaaaaaaatagaatagcagaagtaatcagtgaaaggcattttaatacaattatatctagatttattaaaaataaaattttagtccaatttaattaaaggccagaaactagatttttaaagaatattagtctttctcatattttccccaaatcagttgctttaaaaaaaaaaaagtgtgcagatgcctcaggcacaataactgtactcaactcaagaatttgcaattaagaaaaaaaaaaatcaaacctcaaagaagaaatccagcaactcagaggttcaggttcatttaaacatgcatacatttacatgggcacactttttttgttttgttttgtttttaagatggagtttttgtttgtcgcccaggctggagtgcaatggcgcgatctcggctcactgcaacctctgcctcccgggttcaagtgagtctcctctctcagcctcctgagtagctgggattacaggcgcacacaaccgcgcctggctaactgttgtatttttagtagagacaggttttcaccatgttggccaggctggtcttgaactcctgacctcaggtgatccacctgccttggcctcctaaagtgctagcattacaggtgtgagccactgcaccagctgggtgcacctttttgtttgtttgttttgttttgttttgttttgttttgttttgttttgttgacatggagtctcagtcacccaggctgggattcagtggcacgatcttggctcactgcaacctccgtctcccaggttcaagcaattctcaattctcctgcctcagcttcccaagtagctgggactacaggtgtgtgcaaccacacctggctaatttttgtatttttggtagagatgggtttcaccacgttggccagactggtctcgaacttctgacctcaggtgattcacccaccttggcctcccaaagtgctgggttactggtttgagccaccacacccaaccgggcacacgtttttagccaagccataggtctgattaagtacagtcagattccttgagcaggttacaaagctgtggatttgaatggagatctttagttcccttgcagaacaatgagtttccaaaagcagagtggcttacagcctaaccagctgcttctctcagcctttaaccattttgccctcctgaaaattcatctttggtttccaaccacctcttccaatatgcctgactttttgtgattctgttagtagaagagtaaaaagtcaaggggaggcaagaatgaatgaatctcatataaaaatgatgctcaagagaatcccttaattttcaagacagcagcccaaattgtaaacattgagacttttacagtgttaaaaaaaaaaaagtgtttacaggccaggcatggtatctcacacctgttatcccagcactttgggaagctgaggcaggatgatcgcctgaccccaggagtttgcaagcagcctgggccccatagggagaccaaaaaaaaaaattgttgttttggctgtagtgtcacaggcttatagtcccagctactcaggaggctgaggtgggagggtcgctggagcccaggtgaggtcaagcctgcagtgagccgtgatcacaccaccacactccagccttggtgacagtgagaccctgtccaaaaaaaaaaaagattaaggcagaggaaatgttaaaggttacgctatatttagttgataataatggtaagactgttcaggtgttttaactatgagagtagggttgcctctttcttaaatttatatatgttcttattgggtataatttctagacagaatatgcaagtatcacagaatatggatggcaattttatgttgcttgcacgtgactttaggttcttatgtttcatgataggagcaaagaaaagtcttgcttgccaattcttatgattgcatctgttctggaaatttactagcatttgttacccaggatttctgaagtgctggtgactgctgcccagtagtcttggtgggcaaagttactaaaatgcatcacgaatccttctggtgtttgcttgggctatggcagggtttctggaccttagtactattgatgttttgggccagataattgttgcggatgattgtcctgtgcattgtaggatgtttagctgcatcactagcctctactcgatgccagcagcacccccaagtgatgacaatcaaaaatgtcccctgggaggagtaggggatagactctctctggttgcaaaacactgggctatggtgttgagatctgcagtgatgagcagctttagatatgtgaacagaagcccaggcgtggtggctcacacttgtaaccccagcactttgggaggctgaggtgggcggattacttgagatcaggagtttgaggccaacctggccaacatggtgaaaccccgtctctactaaaaatataaaaattagccgggcatgatgatgggtgcctataatcccagctacttgggaggctgaggcaaagaaatcacttgaacctgggaggttgaggttgcagtgagctgagatcgtgccattgcactccagtctcggcagacagactgagatgccgtctcaaaaataaataaataaaaataaaaaagtgaacagagaaatacccgtgcaatactgtgtctcatcccccaaagacggagtcttgctgtcgcccaggctggagtgcagtgacacgatctcagttcactgcaatctctgcctccatggttcaagcgattcacctgcctctgtctccgagtacctgggattacaggtgtgcctcaccaagaccagctaagttttgtgtgttttttttgttttgttgttttttgcttttttttttttttttttttttgagacgaagtctcactctgtcacccaggctggaaggcagtggcacagtcttggctcactgcaacctctgctgcccaggttcaagcgattctcttgcctcagcctcccaagtagctgggattacaggcacctgccactgcgcccggctaatatattttttttttttgtagttttagtagagacagggtttcaccatgttagccaggctgatcttgaactgctgacctcaagtgatccatccatctcggcctcccaaagtgctgggtttacaggcatgagccaccaagcccggctggtctcattttaatgtaagctctaacttctgtatcactgctttgcacattgtagataaccagtgaacattttttattgtataagaaaaagtaaaataaacaaaaatatgccaaagcaaatatgataaatacacatttagtaaggtaaaagcaagtatttgataaaatgtgtaatgtagtctagtagctttatttagaaacagaaaacaacataaaatgttgacttgaaacattgcgtatgcatatttgccatgtagacagtgagatatggaggtaaactgctttcctagttttgttttgtttttttttttttttgttcaaaaggaattcactctccccttgtccactgttataaaatagcaaatggtgattagcatctgtgctgtaaccagagacactgctgttcccagctggaatctgtaggttgtttgcctgctagagattgtgacaagaagccagttaacatggagaggtgtacatgtcagtcttccccagaaaaggacatgaaacagtaggaccatccttccaacccatgacctacatctagaggcattctttttttctttttttttttttaaaccggaacagaaatatcatctaattctttctttacagagaagtggtataaggaagtacattctggccaggcacgatggctcatgctgtaatcccagcactttgggaggccgaggtgggtgcatcacctgaggtcaggagtttgagaccagcctggccaacatggtgaaacccctcgctactaaaaatacaaaaattagccgggcgtggtggcacacacctgtggtcccagctactcgggaggctgaagcaggagaatcgcttgaacccgggagacggaggttgcagtaagccgagttcactccattgtactctagcctgggtgacagagcgagattcgtctcaaaaaaaaaaaaagaaaagaaaagaaaaaggaagtatattctaagcccttgaattgatcttggctttcttcattatttttacaagtaaaaataaaaactttgatatttctgatgttctgggatattataggaatgataccacttgaattcagctttctaagaagtctggtatttcaatagtcttaatatgagtaagaaaattatgatcttggtactggatctaaggcagaggtatcgaagctgttttaatgttgcttgagataggacagaacttcagagtaaaataaatgtgtatagacaatctgttcaatctgttcaaattaagttgttgagctgtatatttgaatcttaagactactaattttgttgtatctgtcttttcccaaatatatgtgtacttcttttaataagccaaaacctatgcaacttttactaattcttccctaactacttcttttggaaaatgattaaatcttatgtctcacgttttgacatatctattgcatttaaaagataaggttgatcatgctgcttctcaaactgagatatccattcgagttatccaaggcccttggaaaacaatcgttgttgagtctgtatggggggcctgagtcccaggtggtgttgactctgctggtccatgatcctattttgagtagtagactctagtagcgtctcctgccttccatatggtgcagatttgcagcattgagacaggaagtaagaaactgaaaaggaaaaccattcttacctttggtgttattgttcttggtatattacagataccaacaagtatgaggcaatcctgagacatctacctactgagcttttctttccttaaattcacacctcaagaccaaggaaaccgaaaaactcttacagtctccctacatgtgttcacttgtgcccctatttcctgtcattaacatggtagtgtagccaactcctgctagcctgtaaaagctaattattacagtatagaggaattttgtaagccatagccattagtagcttgaaataccaatggtgggagtatttataccatggcagttggcatacactgtaactcaagagtgttctatttgtttgtttttctagacagtgccagtttcccagcatactcctgtctctcattcagtaagacaaagcacttccccttattttccaatacaggacatgatatcccgagttttgagcttcttgttaatagcctgttgcacgctaaccacgcagctcagtgaagagcaagtttattcccataacaaacaggaaacaaaggttgaggaaaaaccacagtggtacccttttgtgagtgttccctaacaccgtcacgggagtcctgattagtctaaatactttacaagtaaatctccttcaggtggcattttataaacaatctttcatcatggagagatgagaattgggtcaggtataattagaatgacagatgtattggctagcctgagagaattaacgcaattcagtaaaaaggctagccaactgcggatatcttctagttacttccgtgacaaattagcaccatcctcttgtactgaagcagtgctttcattagcatgcacagctgtttgcatcatctttgtttgtatttcaatccatatttggagcttaagtgagatttgtcataagacttcagttcaagcttgcttgcctaattttacatgcttctatttagtaaaatatgattactaggtcataaatatttgataatttattgccttattagagtaattttctaaacatgttttttgacgactgcttgccactacgtacaagcacttgaaaaatgttcttttctattaaaagtacatggttccagaattgggaaaatcacgttcttaaaaaataaccagttttctattgtgttggcttttaaaattttttcatcagtagaatcaaatgcaaatattgtctgcttatttttcaacagaatacaagtttgattttaataacttaggctcatgaaatgtcaccacgtagtaatacttagaattacagcaataacttaggctaaaaaaataaagttgttatgaactacattgagctcagacagatatatgtattatgtaaacatttatataaaatgtatataaattgtatattgtattatataattatatattgtaatatatagtatataatatataatttataaatataatacataaattatatttataaattataaagtttttatataatatattataatctaatatattataattatatttataaattataacgtttatttgaaatattgaagttttgtatacttagtggattttaatatttatgtcgttttcattttattccactgttacattaaggaagtaacttattacaaaaataaattatatttgtcttacatttgccctttttactctacttaaaattggagaaaaagagttcaagatagggaatttctgtcagaaaggagaaatagttgtattatgtgaagtttaagtagatattcttgtagagtatggagaaaataatgctataaaatgttgccttttaaaaaaaagttcagaaaatatagttcctagctctctctaaatgactagtttgattgtgactgctttcccaaaatttgtaaatttaaaatttatacatcacatggaatatagttttatttcacatacattccagtaggctgagaatacttgaaattcaatgattaaaaatgaaataataataaccagctttgctttattctaaaaccagctttattctttatttaccactttatttacagcgaattatttgctaatctgttaactttgcttcataagaaggcattataattatcgtacatttgaaagtggagattttctccccattctggttgccagtttcacaactgtgttcattctaaatttattaaaatatgtaaaatcagctttctaaccttggttgtccacaaagaatttcactccaatttgaaatatctattcagaactaattttttgtggttgagcattattttttgaacaatgaattgcataatcattttgtataatccagggagctctggcttagattctgtattattttgtgttatactgatttttagaaaatggaatgtagcgttgacacgagcacaaatctcagcaagggcctaccttacaaagataaaatgcgtggagttttattagaagcacatgattttgctttgtgtttcgtatacaccagcatttcagtgtagtaaatggcattttgtcttgaagagtgagcagagttgttacaaaagaaggcataatgcttccttgccagcagaattcagataagtgaatatcagaaaagctatttgtgatcttgaaagtgtaagaaattcaacatcaataaaggattgtggttccttagatagccatgtaagtctttgcctatgtttctaacatttctctttaggaaatattcttgcttttatttttctgaacaaattttctccattattatctctgatatttactttgaacagaaaggtggattggaaatcaaaaaataagtttgatttcaaaaatgatttcaaaatgttagttttctcagtattttacattttgagaagagaacaaagaaggcagatgaagagttttttgttttttcttaaatttgttttcttttcaactttatttttaattgacataataattacatatagtatacattttgaagatacggttttaattttcacaggaatcttatttgggtttagttatataaggtctaattttgcatcctctacatttagtggctgatttataaatttccactgagtgataatagtaattaatgtgaaacaggttttttgctgatgtttttagaagtttcagtagattaggaaggaagaaattatgctattgagaaaaatagaaaatgtaaacataagcatttgaactctctcttgagatatttttatcttccatgaaactagatgcggcttattgaagatgtgtttcaggtctcagtgctctaaaactcttctacttggtgagcatcttgattggttagatctcttactaatatcccattgctagagagggatgtaaaggaaattttctcaaactgagatttccaaatcttccaatctctgagtcaagtaaagagacaaggttagaactcttaggcaaactgaaaaatcaatattcctatattatcattatttttttctttttttgacaccaagtctcactctgtcgcccaggctggagtgcagtggcactattttggctcactgcaatgtacgcttcccaggttcaagtgattccagtgcttcggcctcgcgagtaggtgagattatatgtgcacgccaccatgcccagctaatttttgtatttttagtagagacagggtttcgccatgttgactacgttggtcttgaactcctgacctcaggtgatctgcccacctcggcctcccaaagtgctgggattacaggcttgagccaccatgcctggcttcctatattcatttttttatgtgggctttttaaaatcttttcaatagcaaagacttgacaccaacccaaatgtccatcaatgatagactggattaagaaaatgtggcacatatacaccatgaaatactatgcagccataaaaaaggatgagttcacgtcctttgtagggacatggatgaagctggaaaccatcattctcagcagactatcacaaggacagaaaaccaaactctgcatgttctcactcataggtggaaattgaacaatgagaacacttggacacagggcggggaacatcacacaccagggcctgttgggggggtggggggttgggggagggaaagcatcaggagaaatacctaatgtaaatgacgagtttatgggtgcagcaaacaacatggcacatgtatacctatgtaacaaacctgcacgttgtgcacatgtaccctagaacttaaagtataataaaaaagaaaaaaaattaaaaatcttttctttgagacaattgtagatttacatgcagttgaaagatttaatagaggccgggcgcggtgcctcacgcctgtaatcccagcactttgggaggccaaggcaggcggatcatgaggtcaggagatcgagaccatcctggctaacacagagaaaccccgtgtctactaaaaaatcgaaaaaaattagccggtgtgtggcgggtgcttgtaatcccagctactcaggaggctgaggcaggagaatggcgtgaacctgggaggcggagcttggcgaagcctgcagtgagtggagatagtgccactgcattccagcctgggcaacagagcgagactctgtctcaaaaaaaaaaaaaaaaaaaaaaaaagaattaatacaaagagaccctgcatagtcttcactcagtacagtatcacaactattaaattgacattaatcccttaacactgctttaacccaagtctatgctgctgcttctccgtgttcacttctgagaggcactggccatttcttgtgtgcttattcatactttgtgtaaaagcattagcatcatacatcgctggtgctgaccctaccctcagtcccagcttctcccagagtaggctaagattctcttttctactacatggaaaattgttctggaataataaagggttagcaaaaaagtcagagaaaacaaacagttgcattccctttccctgtagtagagtaggaatataattatgagtgatagaggatacgttccattcctttcccagtcctctccgaagtcagcttcactgctgtaggaagttgctgttctcattatttccctgagggaaagtgttgggaagtgagagttgaggtgatggggaatcagggttgctgacaattgggggaattataacgagaagctctttttcaccaggagaggggttgcatgttaagagaaggcctatctgctcatcctccatgtcagcagatgagaaccagttggacaaggtagctgtctcttagagattgagaagtaacaaaagcacactgtcagtcctgttcttccagcctcacgtacatcttctccatacattatgtatttgacattaaattaacatacactgttacacccattcctgaccgcattatctcaggtagccttttgtatttgagtattgtgggatctgttgctattgcccatgatgcccacttggactccaccaaggcagtgaaactcttgggggccgttcaaagtcaagagtgccaactgcccctaacaggattgggagaaccaaccaacactccccgaatagggactaactcactcttttcttggcctttatgaaaggaaggagttaaggctcttacagctggagactccagcaagagttgtaggctcaacgtgtagcttatactatttacttaattaacatgtaaatggattttgagttctgaatgcttgttctagttgattagggctcatttagcctggcttctacgaattagctataacaaatggtttcatagctgttatagaatgaggcagaagaaaataaaatgaatgtagcattatgtttaattagtggtataggaaaatgttaatataatgccatttagattctggactggggagattgtgcctttatcataagtaagaaattgttgctaggtttcacataagggcacatagttatcatgaatcatctccttcgatcatcattcttttatcccattacttgacttgcacccatccaaaattctaccacttttatttaatatatagactcataaagacaaggtttgtgcatctgcagagctgtgatgttcactgcgaggcccgtggcacacatctataagaagacacatatttggtactctaagatgatacttttttttaatgccaaaatgtgagggtcagcataaattgccaaggcatggtaaattttgttgccaatgctcccgtgactatggggtgaagggattctgtgcctcccttggtagcaatgaccacggtgcttgcaatcccagtgccaattcccggcacagtgcaggctctggaggcactgctgccttgcagtcttattggaattaacactgcctgagtaagagattaataatgggtattgttgtgtcttagaaacgttaaagagcatgtgacatgaatatgtacacattggtgaaggagatacagagaaggaaagcaaagtgaagctgtagatgtttgttacaactgaaggtaagctctgggagcagagaccactgctggctatagttgatgggatccacaatgtcaatacaaatggggactaactattgttttacttccctatacacgttgctctttcagtagatgcaataaagtactggtaaaaccagaggtggctaccatcacgatgatgtcaacaggagggacagtcagcactaagcccagaaggtgtcaaacactccgcaggagaaatgcgccatgcaacggacatgaagatgatctgacactcttcacgtggttttcagatggaaacgtggctacgaaagcatcaacctcattatcatccatcattaaggccatctcactcagtactgctgctttcaaagtccacgctcccaaagcaaattggatttctgtacacaatactcttacaggatgaaacccaaccaacttgttgacgtaagtatcccatctacttcgcaattttatttatcttccaaaattaaaggactggcaccctgatttattaaaagtgaattgggtctagggaccatatcccctctgagttactgacagagcagcttctggcctgtgaagctcaaagccatgcctagatgtgatggatccttgtctttgattggctaattagaatcaatctgttgaaggaccagtggcagtggctcacgcctgtaatcccagcacttagagaggctgaggcaggtgtatcacttgaggccaggagttcaagaccagcctggcctacctggtgaaaccccatctctactaaaaataccaaaaaattagccaggcgtgctggtacaagggtaatcccagctacttgggaggctgaggcgcaagaatcacttgaactcaggaggtagaggttgcagtgagccaagattgtgccactgggcggcagtgcaagaccctgtctcataaaaagaaaaaaagaatctgttgaatattcctaacttggaagtaatgggtgatgcgtggctttcatcttttagaaaggtgttttttcctctgtcagtaaaactaagaagacatctgtgtgtgctaaggcgtcagtctagcaagggcagggcacaaacccagagagagaattgggctgttgtttcacttccaataaaaatgggatatacatgggaggtagagttataattctactcaggattgactttatacatgcaattggatgggtcactgattgactttgaggcaatcagggatgagtgaaactgatcttggggagggtggcaagacatgttgacaggtaagatgtgttttaatgtataacagtgcgtggtgtgtattaatcagttggagttgattgactgcgttttattgtttggaacattcctgcccaagggtcaggtaaatatacaaaatatacaaataatacagatttttaatacataaatatcaattaagtagcataattaaataatacattgttatagttgtacttaatgtgtatgtaaatatatacaaataatacagatttttaatatataaatatcaattaaatagcagaattaataatacgttgttatagatgtacttcatgcatatgtaattaaattattaatgtataatatataaatacatattttaatatacaaataaaatggtcttaaatcagagttaatttaagaccgtttatattagtacatatcttaatatacaaatgaatggtcttaagttaatgtcattgagtataagtcacatttacagatatgacatgtgtttccagataaagtcaatggacagacagcttccaacactggaaaacattcaaaatatatgcaattaattttatatttgagttaaggcaatcatttattaaggaaagcaatcagatgtttgtgagggcttaaactttcgcttcataaccaaagcagtttccttacatgaaagttgacttcttaaaaagagaagtttattttttatgatggaggattgttgtgatgtgcagataccttccgtcatttcatactcatctaaaagcagccaaatgatcttttcacctttggccggaatccttttattgctaccgagtcctgcactcattaaaccagatgacagtgcatgctctgagaggtgtaaatctctagtcctggtggccagttaaattcctcagtaaatgtttggtagatgctgcctaataaaccagtccaggttgccactgggaggattaaaagaagtaaacgtgtatacatgaacagagagacagtgccttttcatgctaaatgtggttccccacatctcctctgattagaggtgtgctctgaacaagccgagacggggccgtgccgagcaatgatctcccgctggtactttgatgtgactgaagggaagtgtgccccattcttttacggcggatgtggcggcaaccggaacaactttgacacagaagagtactgcatggccgtgtgtggcagcgccagtaagtggacccttcttcgagcctggccacctttcgtctctctcgccactgactctgctttttgtaacagattgattttcctggttcttgggaatgggcctgttgctaccactaaccacatttctgtccacttctctaattgctcagagtctccgcagtatgttcaatcatgagcacacctctccgtctttccctgataaagcatggccatggatgtgttctcttcctagctgtagcacatatgtcttgcaatccagagggacttttgagtgcttctcttttaaacaaagctggagtggctgttttgtcttctgcagccagccgtttctgcaaatgcatacttatgtgtttgtccgtgtacatatgtgttcatgtttatgcatgtgcactacctgtgcagatactgtctaccactggaagcctggctgatgcagcttgagttgcattgataaggtgtatggctgtgatgaatacctttaagttggttcataacatgtcttttattgtgctgatgagggaatgtgattgaattgagctcatgcatctcaaatgccggagggtagaagtgcccgtcttgccccctccgagctcagcacacagacatttgccaggtcaaacttctgcttcttctcttgaaagtagaagaaaacttttgacttaacgtgagaaactttcaatgacataaggctcgaggaacataattttattttttttgtttttttaaagacagggtctcattctgtctcacaggctggagtgcaatggcgtgatcttggctcactgcaacctccgcctcccgggttcaagtgattctcctgcctcagcctccccagcagctaggatcacaggcacatgccactgcgcccggctaattttttgtatttttggtagagacaaggcttcaccatgttgaccaggctggtctcgaactcctgacctcaagtgatccacctgccttggccatccaaagtgctgggattacaggcgtgagccactgcaccccgccagaacataattttcaaagtctttctcttgaacattaagcttttcataattccgggggataaaaatatgaagtcatgatgacttaagtgcatgatgaaattttccccaaagaggtaattctcaggaggtccagtaccagatgtgagacttccatgtcgttaacagacttccaagtgaaattcccaattgtgcttatttatttatttatttatttatttgttgttgttgttcatgagtaggaagtatgaactactcaagaagtaattattcagctcagcttgataactaaaaatgaaactcaataactgtgtattacttttttgagagactcctgcctaattctccgctgtgttgcaagggtggcagccacatttcctgcctgagattcctagggattatataaattgttttgcagcaagatcttaggattaagcaaaacaacagaagggcctgcaccattaatacccccactgtaaaggagcccaggatctaagaggaatgtaatggaaaagctcctgttggtctcctgccatcgccagtgaatgagatgactgcttcagtcccatgtgtgaacaggtgtaggaactgataacctcaagggctttttttttttttttttctggctctgattggatgattgcagcttctggatcaaaggactcccttcttcagtttcaaacaaagcagtcaattaggtcaggtattgcgaacacaatggagaattctgttgcctgcagcctttggaacaaaggccttttgttacagtgattctcactggtttagccggtgggagaggtttcctggcagatttgcaacttttttctccctttccctgggtggattcattttctgaaatatcatgtatagtttttggtaataagagatttatttggttttaattattagcagtgatgaatttgcttcaagagattaaaattctctccacctcaccccagtactgccatcccttcacctaacactctctccctttgatcagtttgggctgggagtgaccagtgggcacctgtccaggtgtcctgggtggcacacagtttgctgagggttttgcaaaaggtcgatgctcccaacagagatgtattagatgaggctagctatgcctgattttagaggggaaaggtgacagaataatgtatgaagaaggcaaaggctgaagatcagttagatgggtggacaagaataagtagagagtataagcctcagcaaacagccagagccgagagccacatgctgtcctatgaatgagtgaaataaatggagtttttgtgaaaaaatgcatcgaagggaattggggatatttggcacaaaaggagcaagaaatcctcttctgttaagaaacctgttgttactcggatatactatcagagacaaaatatccagcattctcaaatgttaacttcttacgaaaatagatcttatgtttatatgttcattttggttttgttggagggaccaaacctaagtgagtgattttgtttgttaggttgtttttttgtcagtggactcgtgcatttcagccatcattcccatgtttctctttttgtttttagttatgttctcttattttttccatagtgtcccaaagtttactcaagactacccaggaacctcttgcccgagatcctgttaaacgtacgttgtcattcacctgagggaagggaagaggggaggaggatgctgcttggttcacataactccagcatcatcaccttctttgcatggttttgtgtttcttgaacacctgtcttagtaaaatgtttcttcccattaccttgcttgtaattacatctgattttgccagacagcttgagatgttgggctaagagcatcattgactaagtttcttctatttctgaccaatttcctttttatttagtctggttttattgaatattatatggacaacatcattgtattgtatttgccattactattttatttcctaaaagctatcagtgtaactgagagcaggcttagcctctcactgcttttgcagaactgaagaacaagggctaggtgcagtggaaggaaagtgactttacttagcaaagctagcaatggggaaatggtccaggctcctgcctcaaagcaaccatctcaaattttggattaaaaaacaaaggcttaaaaaggggagcttggaatgcagggcatgaaggaggggtgaggaggtgctgctatacaggacttgttccaaagacttgagttattatccagttcggtaagtgggctggcgcatcccgcacaatcgggttgtaaattaactgcagccttgaggtgatctcctgatgagggagaattctgaaggtgcctaagtcagtcagtggaacttctaagcaagcattaataattttaataataattataagcgtaattagataatggaagcgctgtgcagggagtgcctggtgggaagaaagagagcaaaggttaccatttcattactaaaactggaaggaaaagaaaggaagaaagatctttaaaatagagtactcggttacatcaagatgccatgatttaacaagagactataatacataagtaacttgtttcctcagaaaaagtacttaatattcatggtattgtagtacatggactaattcgtacacgcagatttcaatttatgtgtgttataagacccggtttcaactttagacatgaagggtcacttttagacattaggaacccctctttctcctctcccagaaggcataatggtaggttagaggtgctcaccttttgactaggaagtagagaaagagcctcctataaagaaatgcattgtccagccactgcaggccttacttacagtgtcttatgttttgtttttatttcagttgtaatatcagacgagtttagttttaaaatgtggttttagtactcatatttgaatttggattccatccagaaatagatttatccagtgttaggttagggatgatatatgccatttatgcttatgattgctggaagaagaggcacaatttcagttgtaacttagatattttataattagcatttgtgtacattatcctgaaaaaaaaaaaccctcatctcaaaactgatgaagccagttatcttttttaaagatgataaattatagatgaaggattaggtattttaaaaaagactgcatcctaaactataaagttttttaatggcctccataaaatattcagaataattcacattatgtataacttttgaaggatgtggtttgtactgctgcaacataaacgtttcttttgctgttgtgaaaaaagcatttttctctaaaaacactgtaagtacagcaagtgggttgacagactaggaaaaagctctagctattccactatagtgttgacataggtacgcatgttgagttgcattgtaccgagcattttcacagatcatttaatttttcttcagaacactttgtgggcattttcctcattccttttgtacatacgagaaaaaatgaggcttcaagagcttagtgacttgtcccaagccatcgaacatggcaggaccaggctttgaaacccaaaatgacgttttggccgcactccacaccaaatggctaagcattggttctgacattgttttgccggttagtgaaatcacatttgcgattcagaagcacattttaagaatacagaaaacagtgaaaagaggatgaagaatgttaacattttttcctaaatgccatgaatagagcacgcatcagtaaattaaatgtctttcccattcttttataaaacagtgattatttttctcttgtttcattttagcatttataagaattctatttttccatttttaataactgatggaaacaagcatcattgtctgataaatttattttcatgctgtacacgtaactaccactttcatcatccactgttccaaacagatactgaaagtctcttttgtaattttctccttcccagtaattttctccatctacttgcagtgtatttgggatcctgacacctttccattctaggaggatgaagtgctttgggcagctatattttcttgtctgcctacagagactattcaatcacagcaagtgaagggttttgcagtgctagtacaaacagacaaggaaaaaaacatataatttctagttatttatagcctgtgcagctatgtggtcttatttatagcaaactgcacatttgatttgaaaaagtcatggtcatctggaggtcaaattcagatggcagactcaattcagagaaaaggagctgaactagaaggtaagcaagcctgttagactgggcaacttggacttgactttgctccttcaacaatctagagccagttggatgatatttctgcacaaaggtggttggttttacaggttgctcagtctaagctgcttctagtcaaataacaaatgtgaaaggagatagaaaaagctcttcagttgaactgataaaagattacacttagggagaaaatgtatgatggtttgcattataaaaacaataatttgccataaatcaggcatttctaggtttcaaacttttgtcataaaaaccaattttgagcattgcaattttagggacatattttattgttgttattttaaataaaaatctaaaccacaaatataaggctgagagctttcattttattcgtgaacataggaattcaaatcattaaaaaaaaaccctttctcatttgggataaagaatcttacgagagctgagttaatttctgacattagttttgcacctgcccatttgggtttaggacagtgcaaaaggtttcacatttaatcttcaaaatatagtatttgtagacaataaaattatataaatatttgtggattcatttatattttaaatatgagagtgtgaccattttttcctggtgctgtctccatcagactgcatcccaaaaggcaaacagaccaactccttaatggcatttaatctctcaaagagcatcatgccaatttttagtcagcagattgcaccatgtgatctggccaaagtgtgtcccatctcaggctccttcatttgcgctgacatgtggtacaaacaactaaaccaaggtttctcaacctcagcactattaacattttgattcaaataattaatttttaggagtctgtcctaggcatatgggtgtttagcagtacccctgacccctacccactaaatgccattaacacaactccagctgtgataactaaaaatgtctctagacattgctaaatgtgcccagggggtcacattctggttgagaatcctgttctagagtagtagtttccccacatctgactcagagatagaactctcctggtgtaaacacgtgtactttccacaaatttgggggcatgttgaaatgttagaatgtcagcatcatccaattctcgacagatgtttgaaattgaatttgttagactattgtccaagctctcaatatttgcaaggtaaagtggaagttgctgttgctgtcctgactatagtattgaaggtctcgtagttttcctgctctaatgtaagctactgtggcagcagaagagaaaccagcaaatcccttagtttgaagtcattggttcacctatgcaccacccctttctcctctctgtttcatcttagtttcctagaatcccaggatatgctggaggacaaccatctgtagagatgtcctatagtcttgctacacaggttatttgtactttaggattatgtttgatggccttatagtttgtgcagaggtgtaggcctgaccccatgcaggattgagggagggaaaaagattgatttctaggcacatcagaatggtccagatgacatgaaacagactggtacacttacagagaatatgaaaagaattggaacttaacaagtcaggccccaagttccatccccaggttccaagtttgttgccgcagaagctcataattttcaaatcgtagaaaactcacaccacgcagcctttcaatggaatatgccaccttaaccccagggtcgttgtaaagacaggagccataagacagaagtctgaatgcctaggccatttaatctttggccaaatttgaactattgttcttaatcacactattcttgttcttttcactgtgcagtagcaaatgttagttcccattagcacattctgcaataccattggaactaaaactgccaaattagattaggcaacctgggattacactttgctccccaaccaacctagggagggagaacaattttaaagcattaaaagatgtgatggtgaattaaactacctgtcacgtcagtgccagtatattctatcagattaacaagtgtgaaaagctaaatctttggtatctggaaatgcttagataggaagaatggctttttcttcaaagccataataattagagatgaccctaaaattgaaaggaactggattgcttagcaactcagcattttttaaaaagaagggccatctactttgaatacaggttaaatatctcttctctaaaatgggaccagaagtgcttcagattttggatttcggaatattgatgtattcatgatgaaataacatgaaattcatttatgtttcatgtacaccttatacaaaagtctgaagataattttatacaatttttttttttttttgagatggagtctcgctctgttgcccaggctggagtgcagtggcgtgatctcggctcactgcaacctctgcctcctgggttcaagagatccccctgtctcagcctcccaagtagctggaatgaatgacaggcgcctgccaccacacacagctaatttttgtgttttttagtagagatagggtttcaccatgttggccaggctggtcttgaactcctgacctgaagtgatccaccagcttcggcctcccgaagtacttcgattacacgtgtgagccaccacgcttggcctatacagtatttttgataattttgttcatgaaacaaagtttctgtacgttgcactgtgagagaacaaaggtgttgctatcccagccaccatgatgtcatgtcagtgctcaaaaattatcagattttggagcatttcagattctcagattagagatgttctacctgtggtaaaagaatgttcattatgtctctgctctgttgtttagctatttgccaaaagagggtaagtggatcgtttaataaagtggtcagcaaatatttttcatacaaggccagattatagatattttaggctttgtagatcatgcagtttgtcataactacttaactatgcagtggtagcatgaaagcaacaatagacaataagtaaacaaatagacaaggctgtgttccgataatactacttttataaaagtagccagcagctgggtgcagtggctcacgcctgtaatcccagcactttgggaggccgaggcgggcagatcacctgaggtcaggaattcgagaccagcctggccaacatggcgaaaccccatctctgctaaaaacacaaaaactagctgggcgtggtgatgggcgcctgtaatcccacctactcaggaggctgaggcaggagaatcacttgaacccgggaggcagaggttgcagtgagctgagatcacaccatcgcactccagcctgggggacaagagcgagacttcatctcaagggggaaaaaaaaggtagccagcaagctgatccttggtttaatacagcaggtttttttatttttatttttattttttttccaatagctttggggatacaagtggttttagttacggggatgaagtgtatagtggtgatgtctgagagtttagtgtccccatttcactgagtagtgtacattgtacccaatacgtagttttttatccctctcctccttcccactcttcctcattctgagtctccaatgtccattatgccactctatgcctttgcataatcatagcttagctcccaatttataagggaatacatactgtatttccattcctgattacttcacttagaataatggcctccacctccatccaagttgctgcaaaagacttttattttgtggtttttctggcctactagtattccgtggtatatatacaccacattttctttatccctcattggttgatgggcacttaggttggttccgtatctttgcagttgtgaactgtgcagcagttatttttgaccccaggatgtgcgaggccaggtattttgagagacaccagcaaaggaatctgagtactggctatcaatacctgataattttattaatgagttgagacccagatatgccgtagaggtaaataaccatataaaggaaatatagaagtgtaggagaagattgctctggaaggctggggtaaaatgaaatcagctttatccttaagacctccatagaggttaactgtaccatctccttttactgctacagtttatatgaaactggacaatattgaagattttgacttttcgaactcatctattgagtgttgagcagctatgacaggttatttctttatgtgcctccattaacgaagtcaagaatagcttctgacaaattgacaaaaaacaataacctaaggttaacccattctggacgccagttattgctattgcttcacatatattttttagattcaaacttgaggttgcttttaagttttagtgtgatgtgctgaatagagaatagatgttaataaaaaaataatgccagcattcgttccttcacattcagttcatatatttgaaaaaattcccatgtcagtatgtgtccatggacataaaaaagaaatgtagcttgactagagtaaacacatcatagattatatttttattaccttatgtccatgtgatgcattgatagtgttctccaccaactatgattgcactgactataaaattgtaatacaagggcatattagggggagaatgcctttgttttttcttttgttgttattttgtttttaagagagtctggtattacactggaggatcacaaactgtattttcttgttataaatggctcctctatcttggacttaatggttaggataaatatttgaatgtagaatgcgttaggagttttaactatttttgaaattaggaaaatggagagacactttttttttttttagagacactttttttttaagttataataagcatggcactcggaaagctctgccatgtttcaagattaaagtttcacatgaacgctaacaagtttatatttcactcatatataaatgatcctccttgtctcctttcctaaattatagccatctcaaatgacaacattgctgggtcggtatcaaatagcattttcaatgataaggcaatgatttatataggtcttaatttgttttaatcttctgttaccaaggctgtagagataaattgcttttctgctgatgaaaggagactaacccaattttcttgttagaatctaatattaatatatcgactgaatgccattcataagccttggtttagggaaacattcagccttctggcctgttggagatggccacggtcattgctgtttgaaggtgggtcatttcttcttttgtgtcctgagtccattgtgactgtaaaattatgggtcaccccagaagcctgaggaaacaaatgcatatcaaaatgataggggcaatctttcacagtgcctttaattttgaccccacattcttatatgaatgtgaagtaccacattagtatgaatatgaaatggagtgctccgcaatgattacaaaatcagaactaaaatgagggaaatcagtgcatgtacagttcaacttaatggattatcctctaaggagtcttcagacaggctaggagagtgacgtctgcctcatcctgaagatattagcaggttttcccctgttttaaagtaacttcccttcaaatgctaacagttttctcagaggaaacacaggtatggaaaatgtttcgttggtgtcttggccccagtgatggaggagcattttgtgataggaacgttgggtgcagcatcgccatttatgaataaactgaaagctaacctgtgttacttcaccccagaaaacagagctctggcaggtattgagaatagatcacagtgtgaagtggcagtattgtgacaagcatgcgtgtatcagtattaaaattgaaatgagccctcacgcacatgtgaaagcagtttctcccgttttcatattcagttccctgaggtaatacagcattttggtgtgagagaaagaagggaatctgacccttctcgtgtgggaagggggctgagggcaacaacctcctgtgacagccaccctggtccaagccaccttcatctttgtctcctttttttttttttttttttttgagacagagtttcgctgttatcacccaggctggggtgcaatggcacaatcttggctcaccacaacttccgcctcccgggttcaagcaattctcctgcctcagcctcccgagtagctgggattacaggcgcctgccaccacgcccagctaattttagtatttttagtagagacagagtttctccatgttggtcaggctggtctcaaactcctgacctcaggtgatctgcccgcctcagactcccaaagtgctgggattacaggcgtgagccactgcacccagcctgtcttttcctcttaaaagatcttccttctacttttgtcccatagcagccagagtgatccttcaacaaaacgccccatcacatatactccccctcaaacagcccacgctggtccctcagaatccttactgtggctttaaggctgtacatgatgtcccccatttcttccctgcctctcccactacttcctctcttgcttctttagctctggccatgcgggtctcgtggaatttgccagccagcttcaactcttagggcttccgtgctagttttgtcatctgcctgccatgtccttccagcagccagctgggaagatctgaatgtcacctcctcacttaagactctgcctggtcgctcacttactgcggtctacctttcccctctcccctcagctctcccgatccttctgaactctgctctgtttttctttttcctctttttctccataatacaaatcacatattaacaatatgacttactggcttttaaaaaattcttgtggtaattgtttctttccctagaatataattccaccaggatcagggccttcatgtttttctcattggtttctcccatgtgcctcacatataataagggctgcaatgttggtgggctggaggaataaaagaatgaacaggcgcactaaaggcaggatagtttgtccatgtcagagctgctgtctcagctgctttgatacctctgacttcccagggtggcaaagaataaggatgtggcttatgtagaaggcgttagtcatccaaaatgccactgtatatttggaagcaaatattcaccttgaagcagtgatgtactaggaattagaactgcttttctgttacattttttcatttgttatgagtgtttagatacacatgatcactattaaaaggaagggaggtaatagcctatatatcctaccatgcccctcaaggctctgttaggagactaaaatacaaaggtcatttaaaaagttaaaagcttatgcatgtgatgttggtattgctgctaatgactaggcatctagaggtcaaaacctagagctaaggatattgaaccctgtgttttgtctcgttttaagtctaggtttttgtggaggggggaacatacctagccagcttgcttgcagaaggcatgagtgagcaggctgaaggagggacccaaggccagaacgtcctccatattctagctccatgggctctttcacttgatccctgctttatgacccaacttctgttgaaggatttgccagatagtgtttggggcaggaacagctgtttcatagaaaacaagccaacggacatcataacaaagcatatggttgttttgccaagttgtgctgctcattaacaaaacaaaacaacaaaaaccctttacagtgccccagcatgtggatggattggccctttactactctaaaaattagctttacagcctttttatggcttacccaatcttaacagactttatttgtgtgtgtttagggatgcaaatgggtatgttaaatgatagtgttttgcctctacgcaataaaatagggtaattttttcttcccatgtattaaacgagaacacagaacatgcctagcatggtgggctctgatgaaaagaggctgttatcatttggccaacatggaaatcctagcctttatttatttatttatttgagacggagtgccaacatggaaatcctagcctttatttatttgtttgtttgtttgtttgagacggagtttcgctcttgtagcccagactggggtgcactggcatgatctcggctcaccgcaacctccgcctcccaggttcaagcgattctcctgcctcagcctcccaagtagctgggattacaggcatgcgccaccacaccctgctaatttttttattttattttattttagtagagacggggtttctccatgttgatcaggctggtctcaaacttccgtccacctcggcctcccaaagtgctgggattacaggtgtgagccaccccatccggccgaaatcctagcctttatcagaggttccgtggaatctcagaggtctgtgagcaggataaactgctttatggtagtttaaaatgcaaaaccagaaataaaccctcctaaagccagtttgtttccactttctaagtggttacagtgacctgtgttttaagtaccttaaatatatcagtgacctgctgatatacagcttcctgtttcctctgtgtcctgtgacatatcctgacattccttgagccccactcccttcccaaaaggaagtaccttgatgggtgaggacatagggcacacgtgtctctggccttctgtggacataatcacaaaatggtagtcagtcctatgaatttaatctctttaggatataaggatattcacgaaatagaagttgagctctctggacatactccaccttaaaattgctctctccttccgggatcctcaccagctgcagagcagtagtaatgaactattaaattcatttaacaatatcagcatatgctatccttctctgcttgactagacagtaatctggcttgctggttggtatgaatataggataatttcactcacactaattgagatggggagtttgtatgaatggctgaaaaatttgagttaaagataaaaagagacacagcttcctcaactatgggaaataactgggactgttaacaaagatttacttgaagagaaattgtattgctcagggttctccagagaaacaggaccaataggatatatatgtataggaagagattgattctgcagaattgactcacacaacaattatggaggctaagtcccacaatctgttgtctgcaagttggagacccaggagagctggtggtatgatttagtccaaatctaaaggcctgagaaccagggaagacaatggtgtaaatttcagtccagggagaagagaagaccaatatcctgactcaggcagccaggaaataaaaagggtgaactgctccatcctctgcccttttgttttcagaccctcagcagatcgggtgattcctgcccatgttgaggagggtgatttactttactgagtgcaccaattccgatgctaatctcatccagaagcaccctcacaaagacactcagaaacaatgtttaatctgggcaccttgcggcccaatcaagttggcacagaaaattaattaccacagaaatatttctggattcaatggattaagttggtaatatagtattcatattcatttccacgtgcctaaaaagaaggtttttatcctttttaatatcctcagtcctattaaacatacctcacattcatgttccatggttattctcttattatgttgctaagtgcatttctacttaggccaatctgattatagtgattcagattatagtgtttatcttctttcctttatacagtagacagtgttcgcaaaccataggagctgaaaaaatttccttcttatatagtaagttttatgattccagttttccaaaggggtgcttatgttatggttataacagttacagccagatgactatcttcatcagcaggtataaccccaaatatttatacattttcatttgtttcaaacataaaatatggtttgcctaaacatgtcattctgccagattggactatgcaaaagaatgttactgttttattttctgcttttactttaacttgttctcatttgagctctaccagttaagatgagaagatgactaaagctagggaagcacattttaaatgctaaataccatgttcatttcaagttgggaacttgaaatgcaagtatttttaacttaatcattaagttaaagtcagtaagaacgtggtatttagcatttattcattttaacttaatgattaagttaaaaatacttgcatattggtttgcttgaagctatggagaaaaacatttaccttttttccaaaaaggtcttaatattcaaaattattgtttcaatcttacaaattaacaatttacttatttttgatactttcggccttttttatgtgggctacacctaacattttttgaaaaatacatactgcttttcctgtaggttgcactttgtgatcctgtgtgtaattcattttcagtggttctattttatttattttttgttagtttgtattttcttttgtttctttttctcaatttttaaaattttaaaacttgtccttttcttttttttctttattattgcactcttctaccaaaacattttcagtggctttgaataaaagtatcagaactttcccgtggttagcattagctctgagatttgaacaggatgtattaagcagaggaggagggaaggccactaacatgtatgagctccactgtgtgtcaccctctctgccggatgacttacatgtggtatggtatctcattttcccagctctcctatcatgtcctgcggcatgttatcaccacttgataaaaaaattgaaacatggagtgcttaagtttcctgccccaggtcacagctgatctgaaaaagaaatgggattcaaatccaaatgtgcttaattgcaaatccccacatgactctttccttccttccttccttcccccgttgctgccaatgtaagaaggaacaccactccctcatttgctacagagaagacaggggcagctgtgtaaaggcaccaggaatatgccctgcctccttccttccacttgaaagcaacatctggatagacactcaactgcttttattttttgaaaaatgattattaatcaggattgaagtggagggaaaaaatcaaaacgaatgtttctttttaaaatgaaagatactgtttaattatttaacagccttccggttttagttaatatctttgaagactttggattaagattccagacattttcttgaaggatgtagaaaacgtatttaacttcaagtttagtttcaaaatgacttagctatcaattcttctcattgaagtcctctttgagatattatatcccaaatgtaatacacaggtaataattcaataggaatacttggaacattggtgatatttgaataaccttttgaatgaaacaattgatttgatctcaaaagatagtgaaaacgtctcattttgttttttatgttaaatatgcttcctcttaagtcaaaattcttttttctttttgcttttaagctcataaatactctgaattctcactaatcttttggaaaattgcttgtataggtattataattcacttggctcatgagttacataatatagcagtatatgttgcaattcaaatattgcttagcagtattagttgaattcaaaatagaaatcactttctttttgacaactagcataatgaattcattgactattgtcaaatttatgaagacagaaaagtccttttgtgattcaaaaatgtgtttattgatgtttatatatcttttgtcgtgtttccatactgtctcatgaaggttgtcttcgtaattcagttatctaaatacatcatacatttaccttttccctggggtgccgttattctacaacaggctaattacagatatctgtggtttctgcaggagtcttagtgtatgatattgatgatatcatcatttactttcaaaattgcaaaatagtaatttaggaaagcatggggatttggaaaaacatgtcttcagcaccaactgtttttgctctttgcatgcttgtttcgtaaagaactctaatgctataattgcaaaatggaccattttaaagatttttccttcattctgtacttgggagtggtgaaagacatccttactgtgctgcacagtgtctcatggtgttctcttaaacagcattaacgtcttgtatgcgctgctttactaaattctctgttctgagaaataactgaaaatacggctttctattaaacgagtggattattctgttgttgttggcttttttttctcaaacctccttctcttctactttatagttcctacaacagcagccagtacccctgatgccgttgacaagtatctcgagacacctggggatgagaatgaacatgcccatttccagaaagccaaagagaggcttgaggccaagcaccgagagagaatgtcccaggtaagtctggctcttccatcattcagccctacgatattgggaaacctgagcttgcctctgcctcagtctccccacaggcctgctggctttatcaagatctttaaagatgtaaagttctaattttaaatgtttactgtgtgggcacagtttgtgggttttttgcatcctccgtgaacatgctgcctaggaaggatccaggtatagttggattttgtaagcacaaattaaatgatgtctgtaacattctctctggcgaagaaaggtacttggcattattattctgtgtatatgtagtacctgtaatcaacatgttgtaaattaaaatccatcaaaatgctctttagtaaagatgaggttttgtattaaatcccagactgttataattgtgaacctacgattgtttacagtctgtaaaatcatagagacttaaaactgagctgaaccatagtgattatttcatctagtctcctaagtgatacatagtggaatagaggttcgagagagtggcttcccattttagcacaaagcaaaatcagtgagccagagacaacatttagaatccaggcctttcttgctcctagtacagtactcctttcattatactttgctgaaaaaaaaaaaaaaaaaaaaaacctgttttggtttggtttgtttttttttagcaggtccttaattaagcaaattaaaaaataacttatgtctaaaacatggctaatccatatatactatcaactacaattgaagctatgtctgctaccaggcactggatgttgtattggagtttgataatatggaggattttagcccttgctcagattcctcattcattcattcattcaatcaacaaatatggacttattattttccagtcacttttctgatttgtagtctacaaacctaggagtgaatgtggggggaaaagaagtaggacataaaagtgaatgaataaagatctcaggttaaagtaagccattcatttttagtgttaatattctgtggcaaatatcagaagataggagaaatttttgtcttagcacagatgcttaatctcttgagagacattaaatgcaatttatgaattagactgctgcgtattttctaagatcacagtcagtctttagtagacaattaatctttcctgtaatttctgatctgggtccctgctgaccccaggaagattcctccctcccagggccaaatgaatggcccctgagcatgtctttcccatgcaaaccagtcaatcaaaagctccttactcccaaccaccttcttatactctgggccactattcacctgctctaatcaccccaggaccaggtaccagaccactagggacaacctcatgccccatcaccattatttgaactaatcagtcctaaacccgcctaccctgcttcgctcattctttccatgaaaaccacaataaaaggctcttgctcatgttttcccctcctgaccaaccctggtgcttcccatatgaccctgcatgtagtggcatgtaccggcttcttgggagctgagtaacaaactgtcttttccatgataatcatctcctgacctcttggcctcacctgaataataagaaaatctacccttgaaaacataaaactaatagtttatctagaaaggtacaacacaggtactgttttttgtttgtttgttttgttttttgtttgtttgttttgccttaagatgaataacaatacttggatctactttggtataataacataaagaggaaaaaagccttataatcacagtacttttggctctggaatataatgtgcagttctagtggctgcccacgatgaaaacctaacagctaattgaactagaaagctagccacagggaattattaagttttcacctgatgccaagaaaatcagatctttccttaggaaagacacaggcactgttcggaaagcattggaggactatgaatcatacttattgccactgaaatgtcctcatttgaatttacatcctatctcccttctttatgaagctttcagaggcttcctgtgccctcacaaatccacttctgggcacatgaagtcgtaaaaaaagaacaatgacaaaaataaacaccgaatgctcagcttgtcattttcagcgcctaccactgtaccctgactctggtcttcctaccacctcttccttctcaactgctacccttgctttctgtacagcgttaagctgctgttctgatcaggccactctgctcatcgtctgttcatctcatcttgggcttccctttgcccttggcattgagttcttctggaaatgccctcccactcttcttcacgctgacacatctcacccattccttacaccccacttcatactcagaatgagacaggcagtcattgctcttacctttcatttaattctaaatatttgctccccggttttgttagtgatttctggacacacctgcattatctttccaagctggatagaaaccttgagacctcaagtcatgaagcctgctacctgcattcatcgtggacccactgtagcattttttttaatgtgtgtttttttaatcctggattttttctcctagtatatcttgttcatttttgaccttattaagaaaacttatttcaaattctctgttagttttagatgtgacaggtcttctttaaaataataatttaacttttagcacatctgtgtaacttgtgacttagttcatgattttgtagattttgttcatcttttagtcatcagatatatctgatataacctaagagatgttgtcccagagcagagaatgttgtctactagattccagtggtcataggaatgtgagacacctgaaatcaatatgtatcttcatagtctgtggtgctgaaatctagggacttttcaactttaaacttgcctgcctcttaaatctctacttagtagtagtcattttctctgcatgaaacagccaagtctttgaagattgataaatccaaatgaaattgatacctttgtgcctgcagtggaaaattgctttataagaatccatagagccactgcaagggccaggtcctgagaattttaaattttaaaaattgtgcggttttttaaattaagttttattgtagtttttgttatatgttttcttacaaatacagaggattttggaattttttcatattttggtttgttgttgccattgtggagtataactctaaacctgtagatttttgttgctaaacctgtagatttttgttgctatatgtcgtgactagcatctagtcaaatagaaatctacagctgaaccatgtgtgagcacttttattacttataaacttactacttttagtatatgcttaaaatgaagtccttcaaattgaaagctgacccaactcataggtttttatttcttatcttttttggagatggagtcttgctctgtcacccagctggagtgcagtggcacaatctagactcactgcaacctccaactccctggttcaagcgattctcctgcctcagcctccccagtaactgggattacaggcacgtgccaccacgccgagctaatttttgtatttttagtagagacagggtttcaccatgttggccaggatggtctcgatctcctgaccttgtgatccacccgcctgggcctcccaaagtgctgggattataggcatgagccactgtgcctggcctaggtttttatttttaagataagcagcaacattttaagagcgcccctttctcctgtcactaaatataaataaacttagctcacctaatgaattttttattttataataaaaaattgggtaccacagggtacaaaaacatgatctttagagccacagagatcttggtttatattcttccctctcccttttttacctgcatagcctcgagctggtaccttaacctggttcgtaaaatgggatggccctggctaatctcacaagctgttgtgaggaatcaattaaattagatagattttgtaaagctcttaatacagggtcagcagtaatgctacttgttatcagtcccacagtgaaattcactgttcacagggagatggtcagcctacatatagtgtgtattcatttgcagtagagtcttagtgggatggtgcaggtgatttgtttatttgtgggggtataggatattgttaaattgttctgaaaatcaaaatgtgagttaatttctatagtaatgcttatttgcaactcattagctaaataaatctctttaattatttcatggattcccccagcttaaagcttaaagtccagtttcttaaagtgtatgaggtaaaatggaaaaaatgtaaatgtaatatgggaaatcagttctcacattgcagtagaacattgaacttctatctcaaactaattttgagattccttgcttgaagaattgttggtagagtaccaccactgtgaacattcccaaagcaggaaattgaaatatttatattgcaaggcttatctcatctataaagcaaagatggtcttccatttcccccttgcccacaggttccctttattaacgtggtagaagcaccaaagcagatgggacaatatgtttcttttcttccatgttctattcttgttcattgcagcagggcatttgtcccaattttgctgtgaaccttgagattatttttgatatgcttttcaagtgtaatgaaatatttattccatcttgtttcctccatggttttacaaaaacaacaagaagaagctaattgcctatcatatacaaagaatgaatgccaatggacaataaaatctgtaattaggaacccacatggtgatttgatatagtattgtctcatagaagtcttctatctatagttatttattccaagcctctttttctttcccatcttgaagtatgttagaagagtctattccttaaggctaagtacctacaaaaaacaggctcttataatacagtaatcaagttttctcatgctttgggagtacacagagtatgcaagtacacatctggcaccaaaccaatattttgtttccttgatctttcttcattttacctagttcagagttgcacttcaaacaaattctacttgtcatacacttgaaaaggcagctgtaggtggtaggaagttaatattttctttgaacaacatacagaggtgcagacttttactttttgtatcaggttaatgagtgaacttctctcagggaaatccaggtgaacatcaaagttgagagcaggaagcattgatttcctacaaaacacattcacctgatatcttagtcagtttgtgttgctataatagaataccccagcctggataatctgtaaagaaaaagaagtttaaaattcggctctcagttttgcaggtggggaagtccaagaacatggtgctggcatctgttgaggacttccttgctgtatcatatatggtggaaggaagaagggcaagaggagggcaaaactgagttttataacaacccacttctcacaataacaaacccactccccccataatgatactaatttactcatgaggacagagactgaatcacctcttacaggacttacccctcaacattgttgcactggggattaagtttccaacacatgctttttaggggttacattcaaaccatagcagttggttactaaattagtgctacttgtaaaaaaatacatgtttgctgcattcagaatattacatgttttcttggagtttttggaaggacttagcgtaatccttgctgttcatgacttaggttggcaagctcaaagggccttaattccccatcagttctttaaagggggataggtcttaggatattagacagcagaagtcttctttttcttcccccattatgtactgctttttggcattgtattcatgacacacacacacataaaatgtcatattttctttaaagtcaaaatatacagtttaaaatggtttcagttgctttcataagagagtaaaacttaggtgttcagtttaatattggaagaccttgttcagttaatgtgtgccttccatgaatagttggtatttgttcacatcaaatcaaatgactgtcagttctcggggtaaaaaaagaccaaccttgactcaaaaagctatattcctgcaataaatatgaacatttatgtttaatatactgctgtgattaattatttatatcctagtgggaggtcaaatattcttcagataggaaggggtatgtaataaattttttaaatatctaaaatgacaaaaatagaggaaaaacataatcatccatcctattaagtctgtattcaaaggatgaactgatgattttaaattcaaatgtttccttaatttataggtcatgagagaatgggaagaggcagaacgtcaagcaaagaacttgcctaaagctgataagaaggcagttatccaggtaaaacctgaacccatttcctaccaaacatcacatgccagcagtctttttaatgagtgtctgcaggtttacctttatctgccagcacctcacgtgtgattgttcatagtcccatgaacttcagctgttcttaatcattgtctagtaattgagttgtttaaatcctgccttatatttgctcccaattatttcaagttataattcattgccataaaactcacattgtaacttgcaatctactttttattaataatacatcttttcagtcaccacaatcttctgctgcttctccctccagcaaaaattatgagaatttgaatttttgatggaaaccagtctcaaaattaccttaagtaaaccaacagtttattatggtcaattacttgaggtactgttagtaagagagggatttttttttaatatgtaatataagagtttcaagagtgcatatatttatccaaagttattagtcaaatcagccttcagagagcctatgaaatactgattttcaatgagaaagtaggtttgatgagggttggagagtgcaagaaagtgaagtaagctataaaacgtagaattagtcaatgttggaatgactatgcagtctttaggatactttttagcactagaagaaaatggaataggatgtcttttttagaagacttgaaattgctgcttcatcctacttattcagtccccatggacatatgtgtttatgatggcagcatttccaggagaaagtggaatctttggaacaggaagcagccaacgagagacagcagctggtggagacacacatggccagagtggaagccatgctcaatgaccgccgccgcctggccctggagaactacatcaccgctctgcaggctgttcctcctcgggtaggtctcgctgcagccgagttcacacttcaggtcacagcacagacagtaagggtggggcactgggaactggaagccatacaaaaagaatgaggagaaatgccttgagcactgttattcagaggttcaacccctgtccattccatcttgaaggtcaaagggtcacagggcagctacctccacaaggtcatctctacacagcaggtactcacacttccccacagagcagccagacaggactcccagggactcacattgcaagccctgacttgatttaatattcctgaggtggtgacaattgatggcatagttcaagttcgaacacaaaagctggaaggatgtcttccagtcccttcaggctgctgtaacagaataccatagactgggtaccttatcagcaacagaagtttatttctcacagttgcagaggctgagaagtccaagatcaagacatcagcatacttggttgtctggtgaaagtttgcttcctggttcatagaacttaaattttgtttatcttttatttattttatttttgtttttgtttgtattttgctgtatcctcatatggtggaatgggcaagagagctctctgggccctcttttataagggtactaatgtcaatcttgaaggctctgccctcatgcctaattgtctcccaaagctttcaccctcaaatagcatcacactgtggcttaggtttcaacatatgaattgggggtgggagagacacaaacattcagaccatggcaaaggattttagaagtaaccttgcccagccccctcatcatgtaagtataataatataactaaggtcaaggaaagttgagatttggctgagttgtaagaatttttagtggaccagaaagaattagaactcaaatttccatctcagagcagtggccatattctctgtggggaagcatttgtcagtcatgacattagcaatgatgagacttattcatggttttcagtgatcattgccccaaaaaggcatgttgagtggtacaggcatagatgtgttcaccggcattctgtgggagagcttacttggaatggaaggaactttctgagcatgagtgtgtaacttatgtccacttgttctttttttttttttttttttttaaatgagatggagtctcactctgtcacccaggctggagtgcagtggtgcaatctcagctcactgcaacttctgtctcctgggtttaagcaattctcatgcctcagcctcccaagtacctaggattacaggtgagccacgacacccagctaatttttgtattttagtagagacagggtttcaacatgttggccaggctgatctcgaactcctgacctcaggtgatccacccacctcggcctcccacagtgctgggattacaggcgtgaaccaccatgcccagccatttgttctttctgtttgtcattgagcaagggatattgaaagctctgcctgtgattgtggaccgggccatttttctaaacagtgctatcagtttttattttgtatagtttgaggctgtgtttttaggcgtgtaaatgttccaggctgttaggccctccttgagcctcttcttatgaaatgatctttttatcctttgtaatgttttgctccaaaatctactttaatattaataaagctattccagctttcttttgattaatattaatgtggtgcatttttccatccttatactcttattgaccttgtttgtctttatatttgaagtgtattttttgtaggcagcatgtaattgggtcttgcgttttcctttggattgggaagaccatgtacactgaatgaggttatggatatggttgtcactgaatctgtcatcttgatatttgtttgctatttgtccagtctgttccttgttcttcttttttcctcttttttttttggattaattagaaattttttatgattctattttatctcttttgttggtttgtaagttacaactagtttgttattttactggtttatctcctttgtgggtttataagttataactagtttgttattttactggttgctttaggcttatagaaaacattctaaacttgtcacgatgatgttatgtcagttcaaatgatattataccactccacagacagtactttacaaaagtacttccatttttcatctctctctctctctgtaagcggttgttgtcatactttttccttactacattgttgatgtttttctttaaacagttattttttaatgagttgtaaatttaaaaaaaaaacaacatgtttacccatgaagtcatcattttgggtgctgtaaactctttgcgcagatccagctggtatcattttccttctgcctgagagatttcctttaaaatgtcttagagactgggcttggtggcttgtacctgcaatcccagcaactcaggaggttgagataggagatcacttgaacccaggagttcgagactgcagtgagctgtgattgcatgactgtactcccatctgggtgacaaagggcatcctgtctctttaaaaaaaaaagtttgagtgcacataagttggtgatgaaatctttgtttggctttgaccaaaaatgtcccttttatacctttggttttgaaaaatatttttgctgggtaaaaaatactggattgaggtttctctttcactgcctgaaagatgatactctgctgtcttatttgtgttgatatctttatctttatttctctaaaaataacatgtcttttttttctgtttttacagttttctctatatcactggtttttaacaatttaattttgatatgccatggtatcattcagtctgcccttaattccatctggccgtttttcatcttatcacctcacatactgtagttgttgtatatagaaatttaacctgggctacccccaacacccataatatcgtctgtatcttaacttttgaacctatggaatacagttattatatgaaaactgtttaaatatccatgtttgctaattctaacatctctgtcaactttgaatcaattttgattgcttattattacatgtggcatttccctgtatcattttatgcctcataattttttattaaatgtcggacgctgaatttaaacctgttgaatgctaggtgtttttgtaatattcttgagcttttttctgtcacatagttgagttacttggaaacagtttgatccttttgagctttgcatttttagatttgttaggtgggatagaagcagttatcagcctaggactagttattccttactagtgaggcaagacccttctcagtcatctaccatgaatgttaagttttctcacctgactcgtgggaagaggcattattcctgtccctgtgtgaacaccaagcactgttaatgctaattctttttggtgattttccccctggcttcagtttctttcacatgcatgtacccatcattactcagctatattctcagggatcactctgcacatctctggattctcttttggagcaactctctcctcaccaataccctgtcctgtgaattacaactaccttgatctctccacacacttcatgtcctccactccacgagtcctctaggctctgtgtgggtttccccacctgaaaccatgacctggaaattcagggccatgagtttggcagctgtaagtcctcatttgtttccccttttcaggaatcagtgtccttcacctgatgtctaatgtcttgcagaaatgttgtttatgccaggtgtggtggctcacgcctgtaatcccagcactttgggaggccaaggcgggcggatcacgaggtcaagagatcaagaccatcctggccaacatggtgaaccccgtctctactaaaaatacaaaaaattagccaggtgtggtggcgcacacctgtagtcccagctactcaggaggctgaggcaggagaatcacctgaacctgggaggcagaggttgcagtgagccgagattgtgccactgcactccagtgtggtgacagagcaagactccatctcaaaaaaaaaaaagaaacgctgtttgtatatgaatatattgtccagttattggtggttcaggcaggagggtaaatccagttcttctcactcaatcttggctggaattgtttgtgcattttatgcaacttaaccagaaagtcacccatttgcaccgattttcctcaccattttgatttttctttctatggataaagttacagtgcacagaaagccatgaggagccgttaaagagctcgtggcattcttccaagacgtaagatactatttaccctgttctaccgatgatatcactgcaacctcgggagatggagcggctggttcagggtgacactgctgggaagggagagggtagagccgcgagtcactgtggtgccttctcactagaacgagcttcctctctaaacaaagagcttttgaaaaagaatattcatattagcgttttcattttctatttgccaaaattctctatcttagcaaggcacttgtcaggaaatttttttttatatctctgcagaacaaaagttccttggttcctctcttttttggagaacacgctttcaggagaggagccgtgtgatcatttgccagagaaggataggctggtgggtgctgagaccagaatctttatagcagaaacttgtgaagcgttccagctgaaagtccaatctctaaagtaagatctttgctaaatggacattgatgggactaaaaataagctgagggctgaatggaggctttaacaaatgtacatttaaactctcagtttagtctcatcagccatcacaggaaaggcagtggcaagaatgtttgccgaagtgtcatcttttatcaaaggggataattttagagtggttgtaatcgtgcttattgtgggcctccgcattgcttcatatggaattaggcaacatgttcatttgaaaaaaaaattaaaaactggattaggaagaaatattttactgtcaaaaatcagatcactgttgttgattgatctaaggattcctgttaaattcttaactcggatttatttatttatttatttattttctctctctctctctctttctctgtttctctttctctcctgccttccttccttccctccctccctccttccttcttcccttcctttcctttcctttccttttctcttcccctcccctcttctcttctctaatcttctcttttcttttctcttttcttttcttttcttttgttttcttttcttttcttttcagggtcttgctctttcacccaggctggcatgcagtggtccagtcgtagctcactgcagccccaacctcctgggctcaagcaatccttttgcctcagcctcatgagagttgggtctacagaagctccaccatgtgtggctaatttttaaaaaatttttgtaaagacagggtctcgctgtgttacccaggctagtcttgaacttctggcctcaagcgatcctttcacctcggctttttaaagtgctgatattacaggcatgagccaccatgactcacctttaaatctttcctttgtaataaaatgtggctgggtggtcacaggcctggagtctagggggcattacttgccatttttgttaagttaccatctttaggtgttcatttaagttttaatgttgtatggcttgacctggcacttaggtctgcactttggcaggcacaagaaaattgtaaataccttcttttttttttttttttttttttttttgagacagagtcttgctttgtcgcccaggctggagtgcagtggcgtgatcttggctcactgcaagctccgccttctgggttcacaccattctccagcctcagcctctcaagtagctgggactacaggcacccgccaccatgcctggctaatgtttttttttttttgtatttttagtagagacgggctttcaccgtgttagccaggttggtctggatctcctgacctcgtgatccgccagcctccgcctcccaaagtgctgagattgcaggcgtaattaaatgccttcttgaggacttttataccttcctcttgaagacataaatccagagcttactggtggttgtctgaaaaagatcacatcttgtaataggagtcatacataaatatttctgagatctccctcatacttaaccaccgtgcctggaaaatgcagacaactgtattcagtaaatggtatttgaatataagtaaatcaaaagtgtcgtttccatagattctgtagatgttaccacttagaataattacctgtctaacccttaacaaattctaccgtatattctcagactttgcaaacacgggattccaaaacaatgtggattgttttcagtttctttgaagctcagatttaaatcatacttttactcagtttttaaacctaaacgtggaagtgttatgagatgttgtttttgtgcagctagaattccttgttctactaatgaatttcatttcctgagtccctgtgtctgagtatactgtatgtttcaaatttctgatttagttatgtacctataggcaaatacactgaatggtcaacctaaaaatgcattgtttgactcatatttagagtcatacatatataggcacatgtatttaaaataaatactttaggctagatgtggtggctcacagctgtaatcccagcattttgggaggctgaggtgggaggatcccttgagcccaggaatttgagaccaccctaggcaacatagaaaggccctatctctacaaaaaaaaaaaaaaaaaaagatttttttaattagccaggcatgatggtgcgcgcctgtagtcgcagctactctggaggctgaggtgtgagtgtgaaccaggaagtcaaggctgcagtgagctgtgatggtgccactgcactccagcctggatgacaaagcaagacgctgttccaaaattaaaagttaaaaaatgagataaatacttgaaatattacaattattaaaatagttgttttccccatgggaaaaaaaagttgagcagagctgtgtctttgcactcagaaaaaactcttactctgttgaaggctagtgactcttctaaacaccaaccccttcacctttttactttccttagactttctttggaaaatcaaggagttagcactttttccccctggaagaattaaatgcctctccagaactgcagcacaggaggttaacttctaccacctttggaggcctgcaagctaccagattaaatacttaaagctaagcattcatcatttcttaacctgccctctacagtcatgcacttcctgctttttactttgtcagggctcgtactcaaactattcatagcttcatgaaacaggaactaaatgctgtctgagcctttccccttgtaactctcagcgttctgcttatccttcatagacagaagatgatgatatgtcctgactgttgaagagaaattagacttaatgtgatcctgtacagttaaaccaaaggccagatagggattttttatttcaatcaactttctattgtaggcctaggtttggaaaaccttagcaccccctaatttgtaagacttgaactgttttaaagataagggatacacagccaaagctttctttgtaattctgagatttttggtgtttttacagatacttagtctaaatctttcatcagacagttatcatgattattattctgacttcaacaactgcattttctaaagggaagtgagaattaggaaacattttcctgtacatctgtttatctatcccagttgtgttgtttggattttttcagtgtcttaacgattgaaaccatcttatccatactgaaattcatttcatgcttctatctgctgcttcacattcaggctatcagtttaattgagcaaaaaaaaaatgttggcagtttctatagcatcggcatccttctttggtttctcatttttgaatggttcagccacatgttaaattttgctgagatctctggaaacttcttcacataattctttgatagaacatgaattctgtgagactcttcattaaagagcacggtttcatcactaagttgagattttgctcaaggctatttggtaaattccagcagaagagcaataaatgttcaacaagaaacagccgtcattggagataacaagggtagacattaatgggaggtttgtcacaggtaaacaggtgatggcatgagaaggtttaaaccacctcataaataaatttttcgccactatatgatgtggattacaactaaaccaaactttaaccaatgtgggtgttggtgtacctttcttttctaaagcaaaaaagaaattgtggtactaaacttgagcttttatatgataccgctaattgcccttcacccaacaaaccaattatttctacccatcacttttcgttgcaaaagaaattatcttataaaatatatgtatatagcatatatctccaaagcaaatatgggacatctgtacctcaatgtaactgatagtaagttaaaaattatttgctgagttcttggtatgtggacagatgaatattataatgtttaaggcattccaccagcaggttttgaatttaaccaaaattttatgaagctaatcagaatggaattaaaagttgaaagactgccaggccaaaaagatcatctttcagaaaagtaaataattgctctatacttacatatttattatttatttgttcaccatccgtttatttttagttgagttctgtatacattggtgagcaaagggggactcattagcttgggcactcctaagggcaaacccaataacagatagtgaatgggaaggaaaatgagagaattagcatttagtgaacaaaatcttataaactatgctgaatggtatacatgctctttcagtaaagccactcagtactattacttccctaccttctgaatgtttaccaagttcgataaaatcttgctacatacaaatgggaagtatgtaacaagagatactagtggtttctgggtttaattaagttacatagaacattaagaagtatgttgggaaggcattagcttaaaagctgtcttttgccactgaggccatattcatcacccagattccctccacagtggagcactgctcagtcactgccttcagaatgcaaataggtcttcacaggatgctattaaaacccatagcaccgtatggttttacgctctgctttcttccagcaaacctacgtattttaatgttaatatatatgttcattttatctttgagaatgaaaatgtattatgaaaatataaatatttagtttttgtagacaaatagcacatttaaagatccagtagttattcacctgcctggtatgactgatagagaacagatgggtagcaaagaatcctcaccctggaaacatgtacgcatacacacgcaaacacaatctcgcataagctttaaggggttcattcattttgtgaaggttgaccatggataccagtttaaagatgccaggtgatgtttggcttttaagtatcatcaccttgagtttccttatataaatgttttaatatcaacaaaaaactcagaatttctaataggtcataacactgcctaggtatgggaagaggagagggtaaaattaaaagaaatgcaaatgtacttttctttgaataggctaaccagttagaggatgtatgaagcaggaccaccatagtccaagtatgaatatgcaaaattaaagcagattgctgtaaatctctcttaaaaagtcaagaatatgtcacagttggcatttttcggatgatcagaccgtttgacaaatctctgcaagggtccgagttagtcgaacatatcttttgcttatgatttcagcaacactgtgcgctttgccttctgggttgtattactaattctgttcatcattaagtgtacacatgtttcactgtttgactaaacaaagcttgaagacatacaagtccaaacattttctgtcctttctgtattcccaggtcagaagatcttagctctttatccattctgtgctagagtttgtctgaaagcatgaatcatggggttgtgttgggtgctaaatttcagttctatatgctgccttcactaatttatgactgtggtctgaacaaccaaaataaattatttctgagaactagcaaaataccctggaaaaaatttatgaaacctaccagatttgtaaaaaggtcagccaggcgtggtggctcatgcctgtaatcccagcactttgggaggccaaggcgggtggatcacctgaggtcgggagttcaagaccagccggaccaacatggagaaaccctgtctctactaaaaatacaaaattagctgggcatggtggcgcatgcctgtaatcccagctactcgggaggctgaggcaggagaatcgcttgaacccgggttgcagtgaggggagatcaccccattgtactccagcctgtataacaagagtgaaactccgtctcagaaaaaaaaaaaaaaaaaagaaaagaaaaaaggtcactaagtgatgagagaattaaaaccactcctattttctaccttttataacataaactcttgtctttacttcccaggtttgccatctttataacctgtaactaggagcaagtgatttaataaagggattcctcctattccgtctgcaaattggagttaatttttctcctctttctgcaatttctgttgttttagcttttgttagccataattagaaaatcaaaaggattcattgaaagttgagacaaaattgtgaagtaggaagatgtcttcctccgtaagaggagaaagattgttagaggaagtacatggaggctttggtgacacatccctatgaggaagtgatctgcttccacgggaaggagagaacagatgatagatgactcctagatgctcctgcgtcatgttcagtacaaaatcagagccgcatcagcaaaccggataccctgggaaggaacattgggataactccttggccataaacaaaagttttgctctggccttatgactaagtggattaatagagattagttgttcaatatccttccatctaatggatccatattgttaaaacttaagaaacaccaaagggggagagtgtgagaatctactgccattttctccattgcttcattcaagacttctgtgtccaccttggcatgggattatcatttgcccttttatactcaccttaaactacaaagatcatttgtttgcctttctgaagaaaggaaggtggataaattttgcaggagactttaaaaattcagctcaactcctggcattaaagacaataaaggtggtgattcagaggtccccatggcagtttccccaaatattacgtttaactaagatcatctcaagcacagagagacttaactctctaaagtgtgatttttaaacctgcacacggaaattttctacattttatatgctcaagatttcttgaaatccagggtgtaaaactgtgaaaataatagttctgaacctatttatgaaagcaggagagaattgctttgttcagttttggaaaccaccagggtgcaatttaatgctccaggagagggttttctgtgacctggaaaggttggggtgattcccgtacagtgagtcatttacttccttcttggcaggattatgcccagggcttttaaacgctcttgacacttcactgccttccataagaaacgggtttagggcacaagtgtctattatgataagatgccagatttctagatcaagcataaagctgtggagtgggacaataggacttaataattttaatacacttcccacgtgaactgtcaagtaataagctacatattcagacgtgactggcattgagtcatcctgccattagtcaaatgtatgagacttttcccaagtcccagcaacaccaaatttgagaaatcgtataaaagaaaaatgaaaaagtaaatacgtctaagaaatggggaaatcaataaaaaatgtactagcaccaggggcggtggctcacgcctgtaatcccagcactttgggaggccgaggcaggtggatcacctgaggtcaggagtttgagaccagcctatccaacatagtgaaacccttctctactaaaaatacaaaaattaggtcggtgtgagggtgcacgcctgtaatcccagctgaactcaagaggctggggcaagagaattgcttgaacccaggaggtggaggttgcagtgagttgaggtggaggtgcaccactgcactccagcctgggcgacagagtgagactccatctccaaaaccgtgttagcttttatcaggaaaggccattaaattttcttcaatattacctacatcaatttgacatcaaactataagaacacaatatgtgagatgttttgaaattaatgaaatgaatcttctctttgagacgagtttgtgcacgctatgaagtccattaaatattttctgggaagagttcccagttaaaactactttctaaagtacccaagcacactatatagatacatcaagtaggtttattaatgtcagtatttcggtgaaaattgggaaggccactattctgagtagagaggtgtttgttttctacttgaagactatgaaggatattctgcactactgggcctatttctgaaattgtatctagctgcaagttactcattaatttaattaacaaatatttattagcaaccaaattgtggcaggaactgtgcctagaggtagaaatacattacgctcttgtttccagagaggaaaatgagtaatgttctaaaatgtaaatcttatgtttctctttcctcttgctgtaaatgatgtctaagccatttcggtggtgcctgttcttaatcctttaataaattattttgaatgattttttaaaaggcagtgtgattgtgaggtgagtttagtacaaattaaaaaatgtcacatcagttgcaaacagacagcacataattatgagctaaacactgtttcagaaacagtagtgacaataaataggattcggtataattagtcctcctgggacagatctcttcctctgttctttgccatatattttaataatgagattagccatctaatgccaatataaccagactgtagtattaatacacagaaaaattattgctagtaacagaagatttaaagacatgagggtgatccggattatatgcctgcaggttaaaaaaaaaaaatgtttcttaaactctctttatcaatatccttttcgtgagccactgaattcttttgtttttctgatcatatgaataacccgtcttaagtatgaatattgtgacaatagtaatagcaattactttaagagaatatgtttctatagagataacagaggggtttttccctaccattcctgtatgaaggtttctgtgtttttaattaaaattttaagaaattcatctttgtcttagcataataaaataaacctcactagacaatcaggacaccttgttattcttagatacattattatagctcaagaaataacaaatgttaagcctggaggatttgtattttggccaaaagttgtgagggcaattatttatttatttgagtgaaatatgcaggaatcatatatcaaaaggagggaggtcttttttttaacctcaacaaaaatataaaagtatagggaactgttatctatgtgaacccagcaaatctgagacaggtctcagttaatttagaaagtttattttgccctggttgaggatgcacctgtgacacggcctcaggaagtcctgatgacatgtgcccaaagtggttggggcacagcttagtgttatgcatttttagggagacatgaggcatcagtcaatacatataagaagtacattggtttggtctggaaaggcgagacagcttgaaacaaaaagcaggaagactcgaagtggggaggggccttctaggtcagagataggtgagatgaacagttgcattcttttgagtttctgattagcctctccagggtagacaatcagggtgattggctctaagcagttcccagctagacttttccctttagcttagtgatttgggggccccaagaattattttctttttacacctgtgttttttctttcttaactaaaaatagtatttgtttctgagggatagagataactaccattttatttggtatgatttatttgcctaccgtccaacaaagaaggtaatctgattttgttttcatttccaagcatgattcctagagatgtgtttaggtggccaaatcaatgaagcagaaccctgcaaattcatttattgggagatatcctaaggtcttcctgaattatctgatgttcccaggctttgcttatccaataggcattaggaagaaaaggcttgtgtttatgtagatgcacacaaaatgcgcatctcagcttacataaacagtgaaggggtttcccaggtctcattatccctggaggagctgaggcctggggagtcctcagagcctcctttgctactctgttattgtggcaggccaaatctcactaatgcaggcctccgtaacagctgtttccgtactgactgagtggttcagttaaatactaaaagctaaaaaaaagccagcgcccttatacagaggctggaatgtaacaaaagcccaccaagagttttgcctaggcctttcctggcaaaaccaaggaattcttaacaggacccatttaggattaacaagttttactgggagtctgaagaaactctacaggcctccaagaacaagtttactggaggtctgcaggaactcctcaaacctccctgatttagcaggagacaagataagagtaatcaccccagcacctagacccatttagattaagtaaatttactgagactccagaggaaggtcttcaggactcagaccttagttatggattaaagaagttaatcacttctgtcatgagatgaatgcacacttacacgtagacatacagcttagaaggcatataagttctggaaactttgtaattttgagttggtctggcactaatttccaggccatctccctgtaaaaggttacaaaaataaaaactctcttcctcccagttcatctgcatctcgttattgggctgtgaggtatagtagcccaaccctcagttcagtccgggaacattattatcaaactctggggattttcaggataagttaggaatatattttgaaggagaatggcagtattaaatgagatcagcaattgaaaacatgtgaatacattcaccatttaattacccatctcaatagaagataaggatgaatttagcactagaaaccatgaatgtcacaaaagcctaactttaataccttgaatcactttccagtaatcctaatcctttatccacatggatagaggacattcctatcttgctctttcttctccccacacattagcttaataattagctaaataatttcatgcattagctaaggaataatggaactccagaaacctaggacagtaattgagagactgaacaagctaaatctgaaccttctgcacaattaaaggagctgatgttagcatggcccacagaatattacctgcacttgtaaaaactagaaagtcaggcaagtactcctggaacagactgtcttttctaaccatgcacttatttctttgtttttaactttgtttttgtttgtttgtttttgagacggagtctcgtcctgtcgcccaggctgtagtgcagtggtggaatctcaggtcactgcaagctccgcctcccaggttcaaacaattctcctgcctcagcctcccgagtagctgggactacaggcgcccaccaccatgccttgctaatttttgtatttttagtagagatggggtttcaccatgttggccaggctggtctggaactcctgacctcgtgacctgcccgcctcggcctcccaaagtgctgggattacaggcgtgagccacggcgcctggcctgtttttaacttcgtaagttgctttgtagaactatcttaaacttggtctattttagattctccttgaagggccagatcacaaagtgattaggagaaggaggctctggagccaagacagtgagactaacccattcttcaaatctaacactaactagctgtgtaaccattgggccagggatgtagcctatgtaaccacaatctcctttgtgcttcatgcctcaccaataaggtggggagagctgctatgactctgtcatagggctgagacgaagatttgatgagttaccagcaaaaagcatttaatatactgtctcattcagaagcagtcaatacacattgaactcttattacttagaggaaagaaaggggtcgatgatttatagataaggcctgagtgaaagaaataaatgtgtattgagtatcagcaatggactacgcatcattctgggtaactatcactgaacacatttaatctgcaaatactatctgaaagatactgccatctgaattgcataggtgggaaaagtcaaggcttttgtgcttatttttaaatgtatgttaacatgaataattaattggccgtgcactggtcgcacgcctgtaatcctagcactttgggaggccaaggcgggcagatcacgaggtcaggagatggagaccatcctggctaacatggcgaaaccccgtctctactaaaaatacaaaaaaattagctgagcatggtggcacgtgcctgtagtcccagctactcaggagactgaggcaggagaatcacttgaacccaggaggcggaggttgcagtgagccaagatcacgccactgcactccagcctgggagacagggcgagattccatctcaaagaataataataataataattagtgggaatatatgctgtttgttgtgataggagaagaaaaggggagatccagatgttggtcatcagaaatgacctgcatcttctctaaattgaaatttagcttgaagtagtaatgccaaggccagcctggggccatggcatcctggtgtacctgcttgttggtgacagtccttttaggacaaaatatcttacaaaaacattcatagatgactaactggaaaaaaagaagttatgatgaaaagcaattcttactgtttttgttttttgttttttgttttttttaattaaaagacaggcagttattctctttcccaggcttgagtacagtcgtgcaatcagggctcactacagcctcaacctcctgggttcaaataatcctcctgaccaagcttcccaagtagctggaactgcaggcatgtgtcactgcacctagctaatttttaaaattttcttgtagagacaggttcttgtaatgttgtccaggctggtctcaaactcttggctgcaagtgatcctcctgcctcagactcccaaagcaatccttacttttttaattgaagtgctttttttttttcttatttaaactcttaaaaattcatcccattttcttcaaaacaataaatcctttacaagggagaaaaatgaaatagagcaactaagaaagcatccatgaaggccaggaaggaacatcatggttaaatgcgattagtcacagccccttctgtctccagtcttggatgaataatggtaacagaactagagagatttctaagaccttggtgcttaataacaagcaagcatcgagggtggttgtgcaagatcctgatcacacaactctgcatatcaaatatccttcacaatcaacaagagtcagcctttaatctctgatgttttcaaatgttctttttttttaattcacatgtataacctatcctcttttcaatatatagagatatagcttatcagtcattacctcttttactacttttcttctgagatttaaaaggtcatcctctgatttgtaaattcaaccagatttcacagttcagatgagagttgtaataagttgccaagaactgttgcaagctgtgatggctgtctttctggggattatagagaagcacatttcttttaggaaaaaagaaggcagatgagcccaagttgttttatttttattgtgtatatgtatttgttttctcaagtacagtagcatggcctctgtggcaggcattcaccaagcaaatacagagcaccctctgggtcaagcactgtgttattggggttccaaataaagaaaaaagaccaaatccagccctgtggatctcacattaaagaggggagtaagaatcatagataatttaatgagttaggtacattaatggggatttgcacagtatttcataggagcacagaaaaagggtacctcgttccacctgagatggcagggagatggctcctaagttaactaagcaaaaggggaaggagaggcacatcccataggatatggataacacaacaaaagctccattaccacccgccccaccaccacacacaccatctctggaataaattttgtaccttccaactggttttcagggtactcatgacacatgggttaataatagctaggtttgcccaaatgaccaaaattctattcccaacatgaattttcacaactggtttttttgtttgtttgttttaatgaagaagaaatgttgtgtttttggaaatcatcttacaaaatcatgtagtggaatgcatatagtgatgaaattgttgaagaccagggaatctttgtccttagtttttattaggatggatgttttcaggtaaaactaaaataaaaatgaaatggaaccaattagaaagaaaataggagcacttaagacgaaatgtaattgttgctgaaagaattagaatctgatagcttagaaagaacttaattaaatttcagagtaaaataaatacagtttagcaatggcctttctcctagaaaaatataatgtctcttacagttcagttactccttggcttacaaaatagtggttaaatttcctgtttttctcattttgatttcgtatgttacatgttactggtgatgggattatctgtgtgacattacctctggtcttcaaaatgtacacgtagcaatgtagtctcacatatgccccttgggtgcgaaaagagaaggacctaacttaacctgacagacctcaaatctgttctctttctatagcagagtactcctatttaaaaagaaaatgttgagtaaggaggacagtcatcatatatgtcgagaatgttaaatgctcttgtggaagtgaaaagcagccgatctaagtaattacccattaagaaaggagtaggagaaatgtttagaaggcagacctgcaaaaaggtgactcacagtacgttcacatgaccggatgcattagtggaacctctaacccatcgccaatggaagaagcagtgttttgcacaaacttgaaaaagagtttttcattttcctcccacagcctcgtcacgtgttcaatatgctaaagaagtatgtccgcgcagaacagaaggacagacagcacaccctaaagcatttcgagcatgtgcgcatggtggatcccaagaaagccgctcagatccggtcccaggtaagcgtggggtataatcatcttctgcagctttgacaatccaggattcttgcttcttgggttggtgacaggatcccacgcattctccgagcacctataggtgttttccctatggcaagagctctttaacttctggtaaattctaaaagcttgtcttagagcaatatgtggtttggcattttctgagttatgaaaataacaaatgtaaaaatcttagtctactgctaactgattgctaaggaactgattaaaaccaatgactaaaatgagaaaaacaaaagttgtataaactaaaatcttgaaaactggttcaactgaagtatggcaggcaatcataaacctactggaatgttgagatttcatgtgagcctaaatgaagcccagtaataatgtattttatactccccggttcccaaaggctgaaaactgggatctaccttaggaaatgtgaaattttacattttcttgaatgaaagagttaaatatatatagcatgaaatagccaatcaaattgaaatacgttgttttctagggggaaatttgcaaagaaatgtatttaggcatgagggtcctgttaagagagcctcagtattaggaatcagaggtggcagaggtagcctttttaattggctgttataagcatacaagataatggtaagtttcaagatcaagtcttaaacctgagctcaaaaagttagagaacagaaataggagaacaagaaaaataaagttgccctttcagttcaacctttttaacagtagcagtgttttgtcagttttcttttggaagtttgtatctacctgcagtgcttggtaagaaaaataacctgggcgacagagcgagactccgtctcaaaaaaaaaagaaaaaaagaaagaaaaagaaccattcctacccccagacattgttgacctggagttgtcatcctttgatgcaggttatgacacacctccgtgtgatttatgagcgcatgaatcagtctctctccctgctctacaacgtgcctgcagtggccgaggagattcaggatgaagttggtaagtaagctgttcttttgatgctgcacatggacatgtattttcccccagaggaaaattgaggaagtgagttatctgtttgaggaatatggaagttaatagaacagcttgccttttacgatgaaactgtcaggctggaactagcttactagccttagcaattgaatcagttcttacctctccatacttgtaagactggaggaatgtcgcctgacttagggtatagttttgtaataattggacacttgttattgaattatacgtggcagcattttttctaatttgcccaatcttgttatggctctcaaattatgatgctttggtactttacaattaatggggaaaaaaactcattcttcatcttttgagtgtcacgattgttccatcttacaaatgaaaaagctcaaacttaaaatttgagtaacttactggcctgtgtcacatgcattataagtagcacagccaaaacacataactgtgacttgtgactttgaggttattgttatattcagtaagtcacaattctctttgatggctgagcagggaagccatgagtgttctctgaaccacatcattgtttaaacttaaaagatagtgggctattaaacttatattctgaaataattgtactctcacaagaacttggaaaaatagtacagagaggtctcatgcatccatcacccacatgcctcaccagtgacatcttacgtaactatagtccattatcaaaaccaggaaactgaccttgtgtgcccactgtcttttatgtccctagttttcctaatgactaatgatttcatttaagatctctcatttctgtttctcttggaaagagaatcaaataccacatgagtctctgtcagctgccaaaatgcccataactgtttaacttacttcacaaaggtacatagatgacgattatgttggtgcatctttcaatataagcatatgtacctatactggagatttagtgtgtagtctaccaacatataagcaatatgtatctggcatatccttccccataaagaatcctaccctttgttaattgggttggaaatagatacaggttatcatctggaatcagagcacccaggatgttgtagatggatgtacccattacagtaagtccgactttgaagtgcctgaaacaccgctcaagggaacagctggccctcactttttcccattttatgccagtgttattctgctcattctttcctgatttatgtggccttgtaaatattgtttgtattgctgtgaaatatttggcatgtgtcaagtgatgatgttctgttcagtactgcacattaatggacggaatctgaaattatactttgagctacataacttgcagaagaaacttcatatgtcagggaggtgcagtgtcccagaactttgggaggccaaggtgagcagatcacctgaggccaggagttcgaaaccagcctggccaacatggtgaaaccccctctctaatttaaaaaagaagagaaaaaaagcaacttcatagtgtgccaagcttttgttcagaaggagcaactcagtgttgagcaagaatttatgaagatagtggaggtggagtttttagtctacaccatgaattgagaacagagatctccaattaatttttcactgtatcaagtttctttagcaaacaaatatacttttcaggtatacttggagaatagacatcagtaaggaacctttaaaatactatgtattaaataagtgtaaagaagttctccaaaaagttgtagaaggtacaaaatgaaataatttatcagtcttaatgaactgaagctaaaatcttctagaaaacatggtttgtttgtttgtttgtttgttttttacagctatcttaagcctgttttcacatgtgacttcagttgaagtggcataggtaataactatagggaaataagccattacaaaggactaaaaagttgatgaccaatattccaccctcacccagcaattattgttgactctttataattaaattattagaactttttatttggcactatactactgaaaacattagccactaattagtcacacttccacagaacagatggtggttcagatatcttgaatattacgaaatgcccaagaatagggcagcacaataaacttcaaatctcagtaccagggaggatatttagataactagtatcatggaatctttttctgtaaaaagaaaaaaaaaaacagccattaggttggattaagaacatattagggggtgcagcacaccaacatggcacatgtatacatatgtaacagacctgcacgttgtgcacatgtaccctcaaacttaaagtataataaaaataaagaacatattacgtatgtgctcttaatgtgtgtgtgtgtgtgtgtgtgtgtgtgtgtgtgtatgtatgtaatatgctctcaatccacccattagttgggtttttttaagtaatgacatatatatcattctaaatataccagatgccacattctgaaagataatcttttttaaaaacctttcatttggaatcctgggtgcttccatttttaaatgactgttctctatagaaagagaagtttgcaataacgaaccctgtacactatctgagctgctagtgtcaaagctacagaagtggtttgctggggagaatagcttttctgggttgaacctagttgtcatctatagtcctttttcatttgaaggaacatttaaaacaatacgtccctttttagtaggaatatagttgaaacttcaagattggccaggggtgctaattgcttaagccaaatgttattagaggttcctcatgttattctttttacttttgtatgtgtttaaaatttctcataataaaaagtgttgcttttagcttactttctaaataggttcttcatagattttttttccaggttatgtcttgtagtcgttctaatattctctgattaaatgctttgtcattagtctgagttgcatttatttgctatttctgtatataatcaaattttagatttggagtcagttcagtacaaatagcatactaaaattcagagacactggcaaaaggagaaaattttaaagtccctaaaaatgcatgccttttgtatagaagtttgtgcttataaatacaagcaattaggatgtgcttaatgcagtcaaacatctgtagagagatacaatggtttaattaaataatggtaacagttgctttatggataagaggttttcaccagtctggggaactgccagtatctttagtgggagaggtatatctgcttcagtaaattatgcttccaattagaattctcttttatgggtgaaaatgaggaagaatggagtcatgctgagaagaaggaatgctatcggtgaaggggaaaattgacattaaatttgtgagcagtaaactgtgaccagagcatagggttcatcatgcttgtgagttctggccctggccttgtatcttccattgtgcttccctgaggcatcctgtctgttcatgctactttcccactaacttcagtgaatcccaaattcatgggtctagccacagccagcgtactgaatcccagtgccatattccagaccccaaatatcccatgtgcctctgaacctgcaatcaatgtgtataacactcatgtccttctggaaatttacttgttttacacactctattctgagttctcttggttggcctaaactatccatgatgccttcctctccctcacccattatttcttattagttgcaagttctgtatatttggccttctgtgttcatgtgaaatctctgcacatcccctacttacctgagatcctgtcctctcatcagtgtcattagactcccagccagtcaccctacctcttatctcacattggccccctcccacttcaattcctccttttcggaactatgcaagttcccttaaaaacaaaagacaaaacaaaaaaaacagctgcaggccggcggcagtggatcacctgaggtcaggagttcaagaccagcgtggccaacatggtgaaaccccatctctactaaaaatagaaagattagccaggcatggtggcaggcacctgtaattcccagttactcaggaggctgaggcaggagaatcacttgaactcgggaggcagaggttgcagtgagccaagattgcactattgcactccagcctgggcgtcaagagcaaaactccgtctccaaaaaaaaaaaaaaagaaaaaaaaaaagctgcttgtggtttttccttgcttgaaaagttgcacctttcaagattcaagtaaaatgcccaagtcctataaaccctttctaatttgcatagagaacggagaaaagagctggcatttgagtgacaaccatgtaaccaactaatgagtgcctctttgtgataatgctgatggtcacattctttctttatgaatgttccccgttgaggtacaggaccgccatatagagatgtggcagtggcaggtggtttagggtaagagtggagactgataattttattctacatcccactcaaggagccaagccctctggcattgtgcacacccactggaagtgggctgttcttgcatttcacacaaaggcagcatatgggctagtgaagatactcggaaattcagtgatagcatccccagtttacagttgaagaaattgaactttgaacctaagagagtttgccaacttgcccagcccagatagtaaagtgatgaaagtggggtggaagccaagacctgccagaagtccaaaatctgtgttctttctgctgcctattttcctctctgaagtggaattttcccctacttaacctcaatgtgaaagcactgggtatccacctccaataccatactctaacttggagtaaattatttgtttatatctctactaaccctccatcctgtgaactcttccagatatatgttggtcatccttgcctcctcaagatccagcaaggaccctggtactttttagatattagtaattataaatataaggttgaagccagtccccaggataaaaaggcagatgctccttaacttggactgatgaagtgggctcctccgtaaccctaaagacctgaccaaaactccttccttgacatctagcgtaagcaccacacaaaacaaatttctttcctaggccacagcatcctctaaagctgtgattgatcaagctaactaaatggatgtggttggccaagataacaaagcataaatcagggttctgaggacctttattaataaaattttacaacatggtccttctttgtaccatgaccctctgctatttggtcatctacttgatttaattgtgctgtcctgtttgaccgccaaccacagtctgaagctattcccatgacaaataagtgtgaattttcaagtgtcctgttgtgttataaaaggcccgtgttttattttataatttcatatttttttcattcaattttaattattatgtgcaagttcccaggctcagtcatttattaatgtttttattttttaaaaagttattttcaggcagattatgaagatttcttgcaaagaatggcctcaggcattgtttgtatagagataaaatctcctcttttaaatcactatgtaggtcttcattaatattttttcattcaacaaacgatggaatcattatttcagtgaaactatggctcctcttcagtgttcatattctgctttaattatttattaatccttcaaaagggcagaatcccttcatcctttcaacctttgctttgtcaaattgttacttaaaaatgatggtgttttctttgtcctttgtaatcttccttaaatctctgctaaaaggattctattctactctttgtattggcactgaggttatttatcaaagtgtgcttctctttgcagctacctcaaggctaaaaatgtagctcttttcagagatggctgttttacagaatgctataataaccaatttatgagaaaggcagtaggaaataaagagggaacaaaggcataattgtttcatacccattttttttcttctagcattcaaaattaataaaaacatgaattattataaaccagatgcgggaaagatctctggctgaataaatccatagtgaatggggcaggattgaaagatatggcggggaatcaagaaattcgcaataatgaaaggatgcttattttttattacaattttactgtggcctcttgataaaatgttccactcttcaggaaaaatgcagcatggttatttcaaagacagtgtttccatattctgtttctaataagcctgttgatttgggggtttagtgggtccaaagtagactaggtttaaaatagaatatttatagcacttcccagcccaacaaaatagaaatttaatgttattgagaatttcaagtatccttatgtgtaattgttagtcaaggatgaacatcaaaaaaaaaaaatcataacagcaaatagagagctgtcactttgttcttataagaacataggtgtgactttgtttttcataagaaatgacttttaaatgtatatagatttaatggtttacagctgacttaagtatttggacataagaactttttttttttttttttttttgagatggagtcttgctcagtcacccaggctggagtgcagtggcgtgatctcggctcactgcaacctccgcctcccgggttcaagtgattctcctgcctcagcctcccaagtagctgagactacagacgtgtgccaccacacctggctaatttttttgtatttttagtagagacagggtttcaccatgttggccaagctggtctcgaactcctgatctcaggtggtctgcccatcttggccccccaaaatgctgggaatacaggcgtgagcccccacatctggccaagaacatttatacatattatcaacaaccaaagccttgttcccccattggtttcataatagtctcagagctccttattcatattttccctagtgttattaagtaacagacatgaggcctgtaagtttagctgcctgtgtctaaatgtatatctttgacccaagacaatttctctttcaaaatagaaccactcatttataaatgaaaatgctttgtcaaatgaatggcaaagtacggtatactattaagacagcctcctagttttctgacatttggactgccatgttgaaatgtctccacacagcaagatacaaatgtgtgaatgccagtacacttcataccttaggtccccaactggtctgtctgcagacttgaggttacagacctgcaggtgtcgaactcaccccatagtggtggttagtagagtgctttgtatacgtttagctctctatgccttttttggttgtgatattaggtaagctctctttttcttgctttggagcttaattatggaatctgtaaatatagtgcatatgtcatccagatgatctgtggaagtcattgataatgacctttaaaaattcacatgtaatacagcatccgttttcctgaatgatttttatagttttaccattggcaaacagatactttcttttatgtatttctactccataattttaggaaaaagtaaatccttttagctacattaaaaagaatacactttctaggaataatgaatgtaaaaaaagtttccttttttaaaaaaatattgcgctctctaccattctggcagacaaattgttgaccttaatatgtataattcagtgcagtatattgatcttgtttattgtgctccaaatggacgctggcagaaatttgaggaattaaatatcaaccacagtgttttcttcatgcgattgcaatggtttgttatggattattttgttcagttcaaataaatgatgtacgttcagattctttgcccaattttttaattgggttgtttaccttactttcttaattttatttttatttttatttttatttttatttttggagacagagtcccgctctgtcacccgggctgaagtgaagcggcatgatctcagttcactgcaacctccgccttacggattcaagcgattctcgtgcctcagcctccccagtagttgggattacaggcacatgccaccacatccagctaatttttgtatttttagtagagacagggttttaccatgtttcccaggctggtctcaaactcctgagctcaggcaacctgcccacctcggccttccaaagtgctaggattacaggcgtgagccactgcactcggcctgctgttattattgagttgtaagaatttttatatattctggatactattaaattcttatcaaatacattatttggaaatattttacccattctgtaggttgtattttcacttccttaataggatccttttgacacacaaaaattttcaatttagaagtctattttatcagttttttcttttgtggcagttactatggtatggtatctaggaaaccattgtccgaaacaaggttacaacgatttatacctgttaccttctaagagttttgtagttttagctcttacagttaaatctttgattcattttaattttcatatatggtgtgaggtagaggtttgactttattcttttgcatataaatatccagtgtcccagcaccatttgttgaaaaagactattcttgccaggtgcagtggctcatgcctgtaattccagcattttgggaggccaaggtgggcagatgacttgagcccagaagttcaagaccagaatgggaaacatggcaagaccacatttctacaaaaaaattatccaggcatgataacatctatttgtagtcccagctactcaggaggctgtggtgggaggatctcctgagcctggggtggctgaggctgcagtgagccttgatcacgccacctgggcaatagagcaagaccctgtctcaaaaaaaggaagaaaaagactattatttcccccattgaatggtcttggcactattacacaaaatcaattgtccatagataatatgggtttatttcttaattcttagttcttttctttgatctgtgtgcctgtgcttactgtagtaccacactgttttgattattgtagctttgtagtaaattttgaaatcagcaagtgtgagtccgttatctttgttcttctttttcaatattactttgagtatccggagtctcttgcattacaacatgaattttaagatcttcctcaccccctgcccccactaccatttctgcaaaaaaaaaaaaaaaaaaaaaagtgcggattgcattggatctgtagatcattttggggaatatttatatataatgttaatgaggttttaaacaacacttttatctactagaactgatatttgcctcgaaatgattccaccttgagccccattcaggaacgttagtattttagaagtagcaagagaactgatttagcatgctatcatcttttactccaaattttggtgagattccagagaaattatttgtgagcttttccttaagccatgatgactgacatgtcagtagtttttgtctgtttttatgccattcttttatttttgtgcatgtgtgggcacctcaaccaaatggatggagcctgaggcatggtctcccacgccaaagtctgccgtttcttttgatgatccaatgcagttccaaagctattttctcaactcaccagctcgtttgtatggccctgtaatttgaaacaaaatctaaaaagaaatccaaattaaaatgattgggaagtgaagtcagaccacagtggtggctgtggaactacttcctggcatggaacactagagcagatgtgtcctgctttttttgtagagtcttgggaacaaccaatgattttagactggaacaagggctggttattctgtttttcacaagcatctgccttcaaggttcattttttaaaagaggaggggaaaaaaatcagtgatgtttgccaccctgagtatggagatgaatccaaattgagattaattttgaaatatgtttcccgaattttgagattaattttgaaatatgtttccacaaacactaactgggaatgacatgagtttgtttcatgtgagacggagtttggaagacatgttaatttgcttgttggtgttcaactcagaaacaaattttgcatgtattttctgagtaagtgccattattagttaacagttttcctgccgtatgcactatgggctgctttagaaagtaaatcatagaaggttagttataatatctcatcaaaaatagtggatccatctattaaccggttccaagttatgagacgtgtccaaaggaatgttgacttggtgtgcacctaaacactatttgtgaagaggctttggacttcgagcatgaaacggggtcagagggtcaaggccagggcgttacttaatttcagctcctgttgatggattcattgacttcagatagtgcgtttaaaaaagcctgtttaatgtgtttgtcttttgataattattatgtatttacatatgctcctaaaagcatgagttaaatcttatttctttgaaacagtgcttggcaacaacttgtattgtcttgtacatgccttttgtgtctttgcttttggttgggggggggcattgaaatttgtctgcccatcccctgagggcagatactgaggtgtggacctatgtcttcagcttcctgtatagcattgaagttgctatagctgcatgttctctaaaatttttatacatgcgatttaattgttaaagcttatgatttttaagtatagtattctgatagcaaatagattttgtcaaataaaaactaactttatcatcaccactgagatatcactaggtatatggcttagttctcagtcaccacttttatttgtaaggaagtcttagaagttttcacaagtgtatatgtgatagactgggcacagtggctcacgcctgtaatcccagcactttgggaggccgagtcaggcaggagttcgagaccagcctggccaacatggcaaaaccctgtctctactaaaaataaaaaaattagccgggcatggtggcacatgcctgtaatcccagctactcgggaggctgaggttggagaattgaacctaggaggcagaggctgtagtgagctgagatcctgccacttcaccctagccagggcaacagaacgagactccatctcaaaagagaaaaaaaaaaaaaagctgggtgcggtgctcacgcctgtaatcccagcactttgggaggccgaggtgggcagatcacctgaggtcaggagttcgagatcagcctcaacatggagaaaccccgtctctactaaaaatacaaaattatccaggcgtggtggtgcatgcctgtaatcccagctacttaggaggctgaggcaggagaattgcttgaacctgggaggcagaggttgtggtgagctgagatcgcgccattgcagtccagcctgggcaacaagagcgaaactccatctcaaaaaaaaagaagtatatatatgatgcttgctttagcagcacatatactaaaattagaatgattaaagagattaacctggcccctgcacaaggatgacatgcaaattttgtaaagtgttttatatggaactttacttacatgaggtacctagggtagtaaattcatagatacagaaagtagaatgctgattgccaggggctgagaggatgagggactgtggagttagtgtttaaagggcacagaggttcaatttggcaatattgaaaatagttcagtggggaagatggatggccgtgatgcatcgtccatcacattgcacagcatcgtgaaatatacttaataccctgagcgttacacttaaaatggttaaaacagtaagatttatgttatatatatttaccatgataggatatatatatgtatattcatatcattcgccattgtgaatagcaaggagattgaagaaataaggacacaggatcttcaataaatatgtattaaatgcttcccatgttccacattctttgtcattgccagacacgtcacaggtataagggcccaatctttgttactcaaataatttagaataatttagaatttgcttggggagactttggataaacagttaagaagctgtatccattaggtaaagggacattgcttgctgcgtctcgtagcatttggtagtctcgttagacagccgttcttactcctatcgtttgctgaaatttattagcaaaggaaagaatcttagttttcagctcgttcagccgcatgatttcataggctcaggaaaaccatgtaatatgcccaaggtcagacgtgatgaataagactaaagactgaatctattccagtgtctctgtgtccagtgatacttacttactgctgttgccaagttaaacaaaactgggtttgcagagctgtttattcaccttcagcatcttttcattgaaaatgcggtagatagaagaaatgtccctcttttagcatttgtacctcagtaataagatgcttcccaagctcaaagactccacacccttaaatatgtaagtcagtgttaagatatttaaagagaacatgaatatcagctacattgtgcatgttgcaggaattttatattattttgtatcttctgcttagaagtcataagccagcccatgaaccatgccaacaaacataccttcttccatgtgattattgcagccagatttttcagtgcaggacaagcaaagttttctctgaaagcatgagataataattctcagccaggtcttcgccatttgcaagggatcagacataagagtttttagctctgttgatgttaatagctagagcccctgttagcagatggcatgttagtggcctgttgctgctggctattaaatcatacacattggccaggcacggtcggtcacaccagtaatcccagcactttgggaggctgaggcgcacagatcacaaggtcaggagtttgagagcagcctgaccaacatggtgaaaccccatctctactaaaaataaaaaactaggcaggcatggcggcacatgcctataatcccagctactcaggaggctgaagcaggagaatcacttgagcccgggaggcgaaggttgcagtgagccgagatcacgccactgcactccagcctgggcgacagagcgagactccgtctcaaaaataaataaataaaaatattaaaagtaaatgatacacatcatgagatcatctcccaaggcagcagagaattttgcgtatttttttcttagtttatattgttgcaacagagtaattcttcttgatcacagactttgctttttttgttgttattgtttctaagtttcacttgatcctcaaaataacctgagacagacaaaacagataggttttcccattaatctccttcatgagtctgactttgccagccaggctgatcttatatccatagccctggatgcatttatttatgttattccatctgcctataatgcccatccccaatcttggcctattacatgtgtctaacattactttgatgtgtacatgtcagtgaattaccacttaactgattgttagctttttgagagtatgtatcaaatctcatgtgcatttgtgtgtcctgaaacaaattattaggtataaagtatgtattgcaaataccatgcccagggaatatttcagagctgtggttctccaagtgtggtccttagtctagcaacatcagcatcgcctggcatcacctgggaacttgttggaaaagcacattccatgatcccacccctgacctcctgaatcagcaaagctagggatggggctgagcaatctgtattttatcaagctgtccaggtgacattgataaatgctaaactttgcgaattactgatttagagactaatcaactcattaaaaagttaataaataggtgagaatccattgtagcaccccagtcacctatgctattatcttctaaattcacattatacaaattgtatgccacaaaaatgtttaaggtgaaaacccaaaggaattgatgcattggattaattcacaaaaatttaacagctgcaattcatagaaaaaaaatgcatgcatatctgataattagttgtagattaaaaggtgaacaacttcttattattaatacccaatgaaaatgtaattttttaaaaattatggccaattggtagttttttaaaaatctgttatgccttgtcatgataaggataggtgaaaaggaactttcataaactattgctaagtatatgggtgaaaccttttagactatttgggtctacctaataaattaaaatgttcagtcttttctaattttagcaccgtatttctacagatacactggcatatctgtggagaggggcacttctgcttgtcacctgatatcccttactactactaatatttttataagcattattacctttaaaatcatgttaaagggtaaatgatgtgcaacagactcagtttccccttctctgactcctgtttagtttacatctcttttctctctctcatttgggggctcaatacccttaagattatagagaaattgcagtaggtaatgttggctggaaatgctaacttgtaagaaacttgggtggaaatggtttaagccatcagcctaaacgatcagtgaaaatgtcagacattctccgctttcttcttccaagatactatactctactgtggccttagagttcttaattcctatataattctgattaaaaaggaaggagatgctcctaatataccttgctgttgtcccctcctgttcattagggtagctgatgtcagtcaaaataaagtctagaaattcttgagtactttttttttttgtaatatactgagaatgcttgaagcaaactaaccaaatttaagtgttttaaggatattaacagtaacaggagagcccctcgattttctgctaagaatcaacctgaacagtttccagactgctggttggcaatgtcagtatcatgagaaaaactgaaaaaataagaaactttagagaaaaagaggaatcagtgcaggctaggggaatgaacttggtaatccagtagtctttccctgccagcattttgattgataagctaagtgtctgctttttctcatcccttattttttggcaggaaaccagtattttgatacttgaatgccttctttctatcttaagggagaagccttcttaaacttcaagtgtgaagtagatcctttaggtataggatgaaaaattaagtgggactatttgtgaattactaaatcgcaaccattaaagaaactaatgccctaattagcctgtcttttgacagacatggcatccatatgtaagtctaatattgtatgcaaatgtgagacaggttttgctttctagatctctttgatgtgaaaggaaaagctggcttcctggcttccttcccatgttctgtatggacctgccttcatcctgctgccaacagctcctcaagggaacatgaaagtggaattaaaccctcctggttttcagattcagaatcctgggtgattaagtggcttgatcaaaatcagaaactgtgaaagtgctaaaaatggtcaaggcccaaggagttcctcatgtgtggtcaaaagcctttcagaaatcaaagtgtgtctttaaatacctggggtgcaaaaatcagatgttttttatttaaagaaaaataggtatattagagcagaactgggggccctctgtaggagcctgagtctgggtgtttactgtcgtctaaggccttgttaatgtgggcttgaggcttcggaatccacgaacaggggaagctagcgtctctcgctgactccagtcctagctcgagctttccatactgccctacgtgacttctgcacttttgtgccatcagccagtagactgagaaaagtatctggtatttgtcggtgtcttcggtttagctgctttaagtccttggatggaaaaggctgattgtcatcctgaaatcattgtctcctaatgtgtaattggggccaagtgaagcacagtaatttagaggaattctagttaaaaatacagattcttgggctctacctcagacctacagagatctgcatttttcttattcccccaggtgatcctttaaacattcagaggtttttaaaactcatgcttatatgcaataacaaaaatataaggattcttagaaacttgttatatttgtcttgaacatgggatgacagacattgtcattttcattgaaaaaaaaaatgaagcagagactcagaatgtatttagagacaactctaaatacattctggcagagcctaactactggattgcagagatcctccctgcttcccccagtccccatctataaactggccatgtgaatttctagtggtgttcacttccaaagtggtgattttataaaatattacaatgaagcattattaacctcaagaagttcagatgcatagagagtttatttgggtgtggcagcattagtggctaggttttatttatccaagataagacttcttattagctatgaaaagggattggcataaactgcttattaatgtccattaactgtatctaaagggaataaacagtataaaaggccaggcatggtggctcacacctgtaatcctagccctatgggaggctgaggcaggaggatcatttgagcccaggagtttaagaccagcctgggcaacatggggagaccctgtttctacaaaaagtcaaaaaaataataagctgggtttaggggtacacacctgtaatcccagctagtcaggaggctgtggttggaggatcacttgagcccaggagttggaggttgcagtgaggcctggcggcaccactacactccaggctgggtgacagagggacgaccttatctcaaaacaaacaaaaacaaaaaactgtataagcataagatgggcttgagtcacaaaattctgcctttcataactttcccccatttgctgtttgatttgctgtttcagaaattgtgaacctacttctctacttatagaacatttacctccctcttagattcttccctttctatcattgatactgacattctgcttaaagaattatccatttaggctctcttcaaatccaaagtgatattattttattttaataagagatgaaagggaaaattgacaaaatgtgcctggagttgtcagcattgtaaatgatggactgtaaaagcttcgtcttggaagattgtcagagagcctagtgccagctcaaaaagtgtggtctttttagagaattgacagaaatgttacaaagaaaacatgtgctgaataccaactccaggtgcgaatcctgagaagcaactcactctattctgcagtaggagatgaattttgcaggttatacagcagagcaatttaaactcccttgtttcttaaagtatatcctatagtgacttgggatggaagtcatatactatccccttttttgttccttcaaagtaaatacaccacagagctggagatgtcccagacacagggggaagctgtttggatttttcccactgcctgtaatgaagcaagatagggaggaagaacttgggaacttgcgtggcaaatggtcaagtaaagaaaaagaaaagctttttctttacttgaccatttgtcacatgtgctttcaaatcctgaactgagtcacatctgaaataaatcacttccttgtcatttccatgaaaggggcagtacaagaaattccttgcacatccctggtgagccccttgttactctcagattcagctattgccttcaggaaaaaaagaaaaagaagccgaagaaagaaagaaaacagaatcctctagaaaaagctattctgacctgtgctctttcttttgtctgagtgtgactagataaatgcattagtctgctagggctgccataacaaaataccaaaataccacagactgaatccttcaacaacagaaattatttttctcatgcttctggaggctggaagtccaagatcaaggtaccagcaggtcggtttctgaggaggcctctcttccttgatttacaaatggccacctacgcatcatgtcctcacatggtctttctcagagagaaagagaggtgtctcttcctcttcttcttttgttttgttgagacagagtttcgctcttgttgcccaggctggagtgcaatggcacgatcttggctcactgcaacctccacctcctgggttcaagcgattctcgtgcctcagcctcccgagtagctgagattacaggcatgcctggctaattttgtatttttagtagagacagggtttctccatgttggtcaggctggtctcgaactctcgacctcaggtgatccacctgccttgccctcccaaagttctgggattacaggcgtgagccccgcacccggcctcctccttttcttataaggacacctgtcctattggatcagagtcacacccccatgacctcatttaaccttaattatctctttaaaggtctgatctccaaaggtcccttgagggttagggctttgatacatgaattttcaggggcacacagttcgatccatagcagttggcttattcatactttgggtagatcctcttcatcgttcctcagctactgtctatttagtgcacagcttctttatcctaaagctagtcaggggaggcatggaaggtattatttctcctgtttctgcacctaaggcattaaaacgaggttgtggtctggcagcctaaactcggccttgatgaacttcaaatcctagacctccttggtatgtgaagtgcatacacttgtatggagggatttgacaggttttttttttttttttttttttgagacagagtctcactctgttgcccaggctggaatgcagtggcacgatctcggctcactacagcctccgcctcccggtttcaaatgattctcctgcctcagcctcctgagtagctgggattataggcgcgcaccaccacacccagctaatttttgtatttttagtagagacggggtttcagtatgttgatcgggctggtctcgaattcctgaccttgtaatccactcgcctcggcctcgcaaagtgttgggattacaggtgtgagccaccgcgcccagcccagatttttttaaattagtttttagtgtatccacactgttaaagcaggtggatactgctggatagtataacaaagtatagtgtgacaaacccataaccaagcattgttagctatattttctcatgtcttgagccaaaaggtcacagttaacctaatgttgctactaaacactcataccataaaacattctattccagtcttccagattttacacaagaataaaatgaaaacttttagactactggagatttttttttaaatacacaatttgttgaatgtgaacgctaaattgaaattgacatgctaagttttatagattacttcagctgccctgacttcagtaaatttagttgtgacacaggtacaacagctgacttctttctggcattagaggtggtgatgtttcgtcactctggagttagtaaaacctgaaacccgccaggcatttgacacacagtttgctgccagggacagctcagcttctggcttattggagaggaaatgacctaacctctgtgtttacaaagtgtttgaaactgaggcccttccacttccttgctgagtgtaagggttgacctggcatccaaaatccccatgatcttctcaggataagtcatgcagccattggtggtcaagaaaggatttgttccctgtggaagggcattggaagaggaacagagctgaaacacacgggtgttcagagggaaaacatctctgcacttaagagggctagattagactattagactattatcatagagctcgtgattcatctcctttgtttaattccagccttgagtaaaggactcactaagaaaccacattcggccgggtgttgtggctcacgcctgtaatcccaacactttgggagaccgaggcagatggatcacaaggtcaggagttcaagaccagcctggccaatatggtgaaaccccgtctcaactaaaaatacaaaaattagtcggggatggttgcgggcgcctgtagtctcagctactcgggaggctgaggcaggagaattgcttgaacctgggaggaagaggttacagtgagccgagatcacgctactgcattccagcctggtgactggagcgagactccatctcaaaaaaaaagaaaccacattctattccagtatatttattataaccagaaattcttgtcttatcagcaaatagctaatattcacttacatgggcagtgtattagattcctagggctgctggaaccagttaccacaaaccgcatggccgaaaccaacagaaatatactctcattatctcattattctagaggttagaagtcctaaagcaaggtgttgccagggccacactgcctcttacagctctaggggagaatctgtttcatgcctttcgcttgctctagtgctgctgccagcccttgatattcctttggttggtacatgcacccctccaatctccacctctgtcttcacatggtgttactccccatgtctctgtttctgtgtcttctctaatatgattaagggcccacccttctccattgtgacctcaatcttatatctgcaaagaccctgtttccaagtaaggctgtattcttaggtgtaggcattaggacttcaacatatattttgggggaaaattcaacccataatgcggttatgtttttattttccttgacttttaagaatgtgaactattgtcaaattttttcaaccactatcaaatttaaatctaagaactacatgtcttaaatttatgacctcttcattaaaaaaaaaataataacatttaattggtaccaaaacgtgaaagagtttaatgctttgcatttgcttgaggctgattaatgagtaaatgtgtcaactgtggctgttttaattagccagggttaattaatgtttaccacacttggaagatgaaaaggcatgtataaatgctctataatgtgaatcattttttaatttgttgttgaagcttatagtgtagccaagtaaggattgcttacatcatacttacaaagggaggttcattaatggatacaaatacacagtttgatagaagaagcaagacctagtatttaattatcagcaaggtgactaatttacagtaatctactgtatatttaaaaatagctaggagaacctaatttgaaagtttctagcgtaaagaagacaggctgggcacgatggcttacacctatagtcccagcacttgggaaggccgaggtgggaaaatcacttgaccccagcaattcaagactagccagggcatcatagtgagaccccatctctacaaaacaaatatttaaaaattagccaggtgtgatggtgcatgcctgtagacccagctgctctggaggctgaggtgagaagatcacttgagcccagcagttcaaggttcaagtgagctatgatcacatcactgcactccagcctgagtgacagagagagacccttcctcaaagcaaaaagaaaagaaaaacatttaagtgatggatatcccattatactgatttgatctttccaaattatatgaatatattaagttttctcatataatctgaaaatatgcacatctattatgtatcaataaaaaataaaattttaaaaatgtaaaaaacgatgttggagcactatggtacttaacgtagaggctctgacttttgaggtacattcattacctgttactgaagttgagtatgctttaatattgtatgtttagaaaaggtagttacatttttaaatctgattgtgtaagaagaaaagagtagaaatgtttggggccaagtcaataattatttagtatatcataatttgagatgaaatgtgtttttttttttcttttttagtttcaagttgaaacattttaagaacagataaggaaaggctaactgtgctgagatgaaaataacatttttaaagtaactatcttaaagaaaatacatttctagaattttgtgtaaattttcaacaaagactcagaagcctggatgaggtcttgtgccaagactggaaagtgtggggattagaaaaagtttgaagagattgttgtgagatcctctcgtatgaggcctgaagctgtacatccatggaaagcagttaccccaggcgggaaaacaggttatccattctcgagtgagtggccgggtgggaaatagtccatcatgtcgaatggatcgtactttccagcaccaagatttgtggttctctaggtgaataagatgacaccccttcacttcacttcacttcaccattgtctgcatggagtacgtatctaaaaacaaattagcaaaaaggttgggtctactttacttttcatctcctacactattttcttctttgttctcggcaggaaaagatgaagttgcattttattattatctcataggattcttattctaaaatgatttgatttaaaacccattgcactttatttggataaaaaatgcttcactctctagttcttaacaataacaccagcctgattttattacgttaagcactgcaattagacaatacaaagaatttgcagcaacaacatgttattttatcatgggtggaactgttcattgtctagcagaatttattaccagataaatcccttttggggaatctaatgtggatgtttttttcaaagcgcctgtggagttctgctagtattgggaacgtttccattttcattctgatgcttccctgtgggctgtttcagcatagaagtgagctctctgggtccatgtttccattggctccacccaatattctgaaagattgcaactcaacatgtgtaaacagaacctttctcccccatattttctcttttcgtagattaaactcaggtcaagaattagaagtttatcctccaccccgatagcatctcgccctatcccaaataccgccaccaaaatgcccactgtttttccttgggccagttcctgaaatatctttctggctgtatcactcttgtgtgcatccttatcggctatgcttttggccattttttactgctgactttgtctggttagtcttttataatctccaggcttctcctccatcctttttttacagtttacctgttcatgaagcgcaggtcacttgacccgtagaattcccataggctgggattttgctaattgcatactcatggtataggtcagtgtattcctctgccctctgtatcccacaaactgaaagcctcttggctaagctgcttcccttttcacttcccttgtaccacagcagccagaagagtcacagatcctgggcagcttgtcctctgtgcctcggtacatgcacttgtatctgctaggacaatgatctctttccctggggccccactgtaatatcactagtcacatccctaaagcccaggcttgtttctttgtcattctgtcggtatccctaccataacacttgtaatagtaattatttttatgcccatcttttcttctgaaccatgagcccttcaagtgaaaagaaattgatgaagttatttctagcactcccctggaaaaaggaaggcaggcagggagggaggggctcactagtttatgataaagtggtttgattttcttggttgcagattatttcttttaaagtgactcttttcagcttctctcactcctgtgcatcgtgaatgctctcctgaagacagacgctttccattcatttccaagccccccatgtgaagtgctttctgttgccaggcttggtttccccacacgttgttaaagaagttaaagaagcttgtgaataagctaaagcagaggagaaagaaccattgctatatctagaattgttcaccagaaagcaagttttgtgttaaagaaaacacgagtaggccactgtgcagaagtgcttacagggtttgtgtgctttttaaaatctgcataaataaacatttcaaatgagctatcatatatacaaggatgatgtgctgtctgtgggaaaaggacccaatcctgtgttgtgattttacatatatatatatatataatttgtgctattacacacttgcctgatccccttataattatctgcataagtctttttaggctctttgaatgaaattcactatgtatggatgttgaaaatcatcctttctaccatgagctcatcagacttgctaaccaattctttgcatcctttgaagtataaaattccatcaattcagcatgtatcaacatgaatcaattagaatgcactttcttcacagcatggcggagtttttgctggctgccgggagcggcactgtttcccaattcattcatttgcttgggcccgccccaggatccttcttatcccggtcagatagacttctctcatgagcttgagagacggggctggtcacacaggacacggctttagggacacgactcactgaaactacaaaatgagtgctgctcttagagttgtacccacagcctgcacagctgttatggcaatgctgtgggcaagtcttgctacggcccattctcctccctcccttgtcctgttggaaggttcaggttggagctgaaattcagtccagcacgcagctggacaagccatgtctcctgtatgtgactcactccccagagaaagcatcatgtggactagtaagggcttggctttatcagaagcaaaggagaggtttacatctcttcttgctctctcttagtgggttcagagctccagcagaaaaaatgggacactgtggattgatctccagaaaaccccaaaaccagcactgaaggctccaggagattatgcctttagattgtatacaggcaccagaatgacttttgcctttataaaaatgcgtgcaagagcatgaaaactaatatttgaggaatttttttttctcactgtactttctggtcctcactgaaagcattggcagttttaaaaaatgaaatgtgatactgttatagacgtagcaaacctcacgtttcattttttccaattcattctatatctaggaacttacttagaaggagaaacaaactgtacccagaaaaaggaatgaaactggagaattcttcctcatgattcctctgtgtcctcaggcctaattatcctcattccaaagactctccattgcctcaataacttcgaaaaatttactctccttaagcatagtcataaaaattgcatagtaaagtgataaagagacgaaaataatgctgtaagaataaaaccattaaaaaaaaaccactactcttgattatttctgctgttagaattgtaaatgaattctcattccttttttctacatttttggcatgaaatttatgttactcttataattagtaaaaacattatattttattaataaaagaagactcacagtgaagtcataacatatgctgcagaggttagactcttcaagtcagatttgaagagagaatttcacgtaacaatcaccttgaaatgtcttcaggtcagccatcaaagtacacatctctcaaccagccaggcagccagtttttcctccagcatgtgaagagtgaagagatagctgtttcttggcttaaagaccatatgaaataattgacttatgtttaaaagatatgagggatcaggccgggtgcagtggctcatgcctgtaatcccagcactttgggaggccgaggcgggtggatcacaaggttagaagatcgagaccatcccggccaacatggtgaaaccctgtctctactaaaaatacaaaaactagccgggcgtagtgatgcgcgcctgtaatcccagctactcaggaggccgaggttgccatgagccgagattacgcctctgcagtccaacctggtgacagagcaagactctgtctccagttaaaaaaaaaaaaaaggcatcaaaattacattcacttctatttttatttttgtttgtagaagacatgcagtttgtatcacattaatgggcatatgatgtaatttcactataaatcgaaccagaggaagacatccaaatatgtataaattaaagctgacaatgcctacagtactaaactttttgttttagtataattggagacttagaaaagttctaaaaatatatttaaaaatttttaaaggaagttgcagacataatggccctttacacctaaatacttcactgtacgtttcctcaaaacaagaagatatgtgtgtgtgtgtttgtgtgtgtgtgttgtaatcttaatacagcatctttcagagattatttctgtagtatataaacttggtttttttgtttgtttgtttgtttgtttgtttgttttgagatggagtctcgctctgtcgcccaggctggagtgcagtggcacaatcttggctcgctgcaagctccgcctcccaggttcacaccattctcctgcctcagcctcctgagtagctgggactacaggcgcctgcaccatgcccggctaatttttgtatttttagtagagacgcgatttcacctcgttagccaggatggtgtcgatctcctgacctcgtgaaccgcccacctcagcctcccaaaatgctgggattacaggcgtgagccaccgcgcctggccataaagttgttttttagtctctactttaagttcctgacaacccaggcaggaccaagactccctaatgtagttggaaatcagatcagcacattggcacaagttctacaggtaaacgggaaaaaggagccctacaatctgcttttagatgccagggagcctggctggtctttatcttgattactgactgatgccactggtaggtctaagttctttgatctatgatgtttgaaagccaaaaggaaatgtgttttaaaggaaaagggacttcttctgtaccctcagtctaagccagacaagtgatatttcaggaaaatgtccctagcaataaggaatattttcacaaatgatgtgaagctttgtttgtgtcccttccagggcagtttgttaccataaggggacaaagcatgcttcatttaaacatgtgtggccaggaaactgttatttttaaacaaaaataaaccccgatttagacatgtagtctgagttttaactctgggagattttcaagattgatagtgtagctaaaaataactgacctaattttctggaggtcaagataaaaactggatttatggtacagcatttactttgtgataatatgtgtataaattcttccccaagttggaaaatgtggccgcgtcatacagggctgtatctctcttgaccattgaagtgcctaggtcgctacactacaatttgacttagagttggtgaaacttctggccattcacgtagccatcgtattcatcctgagaaagggaaacctaaagacttgggagagtgttctgggaggaaagtgctattgagaatgggctgtccaagcaaagtgacaggcaggcctcacttagctagaagagggagcttttcagccctgctccaccatcaggaatctccgtgaccttggactactgctttaatctcttttatcctggcttctaaaagataccgtcgaattcattctttttcaaacctatcaaaaatttgaaatgtatgaaaaagagggtgcttgtgatgatagatgggtttatgcttccttttttttttttttttttttttttttgagacggagtctcactctgttgcccagactggagtgcagtggcgcgatctcggctcactgcaagctccgcctccggggttcacaccattctcctgcctcagcctcccgagtagctgggactacagtgccaccaccacatctggctaattttttttgtattttcagtaaagatggggtttcaccatgttagccaggatgctctcgatctcctgacctcatgattccaaagtgctgggattacaggcgtgatatgcttctttaatattagtttctaatccaagtaatatagccatgtcctctataaaatggaacttttcatggaacagtgagaaggttgcattaggaattgggatacttgggttcagatttcagttctgccacttgctagttttaagtatacttctcaggatggatgtcagtttgttcaactgtcagtgggagtagtgatcccactaaggaagattattgtggttatcaaatcagcagatgggtatgaaaaggccatgagtgcagttctcatggttatgaaggtgtcataactggcatagtcccatcacagtatggctttggcatcgcagatggctgtagcatatatgctaatcagaacatccctaccgtccttaaagatctcatgggttctctcccaaatcagctgctccaccgacctacaagtaagtccatgcttctttagtatatttactcactagtgaaggcccgtctgctaaaagtgtcttcagtaggggagagctgctcttttctgggaaacccagcaatgaagtttgtcctgtgatgccctctacacttactgacctgtttcctgagaacttcccgtaacaaatggtccagggaagaaggaagtctgtgaccagtctttcctttcctgtggctttctggttcagaaatgtgaccctgatgataagaaacttcaaggcatgactctggtgttttggcaatattcccctggcagtattgtttcttggctcacactcatctcatgccttgctttgtttgctttgtttttgagaattgtttttttgtttgttgtttgtttttggttttggcttgtgagacagagccttgctctgttgcccaggatggcgtgcagttggcacaatctcggctcactgcagcctccacctcccgggttcaagcaattctcctgcctcagcctcctgaataatggggattacaggcacacaccaccgtgcctggctaatttttgtatttttttagtagagacgggtttcaccatgttggccaggctggtcttgaactcctgacctcaagtgaaccacccacctcggcctcccaaagtgctggggttacaggcgtgagccaccacgcccagccattatgtttgtttttctttcatgaagggataaccgaggctgttgtgtggtggtgtcttggtacagctcgtggctgtggtcagtgtggtggagggtaggtcttctcagatggtaacatgcatgagagtcacctggggatcacattaacatgcagattctgattccctggatctgggtgggacctgaggttctgcatgtctaacaaactcccagagaacacccatgtagcaagagtacagacaaaaggattcaaagcgaagggactgcaagaaccatggaaccagcctcccacgattttgcggatgacgaacccgagccttggggagtttcagaggccatggagagatgaagtataataaacagcatagcagttgtatgttgagccaagaatcagacatgcacagaactgctgattggaaaattaaatctgtttctcatagccctggtgtggcaaaatgcctagctggaagtgggtgaccgcttgatttacagtgggcctcctgggtagggaaaattagtccatcccatttacagctacttccaatgcagctgtgtcaggggagagagaagaaaggacatggaagagagcgtagaggtatgatcttcagtcctttcaggcaggcacataagtaaatttttatttaaaagataagaattggtcatatgcgaatctcctgttagataagattaaaaacaaatttccattttgtggagaagttgcagataaatatttttccatgggatccaaaagaatcaaaaaggaaagaaaatagtaatagcagtggaggttcgatcctagacagaagaaaatccagcaagccgagggacttcatattctcactggtgtccaaatcagagctttttttttttttctttgtttactttaagttctgggatacatgtgctgagcatgcaggtttgttacataggtatacatgtgccttggtggtttgctgcacccatcaacccgtcatctaggttttaactccgcatgcattaggtatttgtcctaatgctctccctcccctttcaccccacccctggacaggccctggtgtatgatgtccccctccctgtgtccatgtgttctcattgttcagctcccacttatgagtgagaacatgagtgtttgggtttctggtcctatgttagtttgctgaggatgatggcctccagcttcatccatggccctgcaaaggacatgaactcaacctttttttttttccttttttttttttttttgtatttgcaaattcaaatctttttttttttttattatactttaagttttagggtacatgtgacattgtgcagcttagttacatatgtatacatgtgccatgctggcgctgcacccactaactcgtcatctagcattaggtatatctcccaatgctatccctcccccctccccccaccccaccacagtccccagagtgtgatattccccttcctgtgtccatgtgatctccattgttcaattcccacctatgagtgagaatatgcggtgtttggttttttgttcttgcgatagtttactgagaatgatggtttccagtttcatccatgtccctacaaaggacatgaactcatcattttttatggctgcatagtattccatggtgtatatgtgccacattttcttaatccagtctatcattgttggacatttgggttggttccaagtctttgctattgtgaataatgccgcaataaacatacgtgtgcatgtgtctttatagcagcatgatttatagtcctttgggtatatacccagtaatgggatggctgggtcaaatggtatttctagttctagatccctgaggaattgcgacactgacttccacaatggttgaactagtttacagtcccaccaacagtgtaaaagtgttcctatttctccacatcctctccagcacctgttgtttcctgactttttaatgatcgccattctaactggtgtgagatgatatctcatagtggttttgatttgcatttctctgatggccagtgatggtgagcattttttcatgtgttttttggctgcataaatgtcttcttttgagaagtgtctgttcatgtcctttgcccactttttgatggggttgtttgtttttttcttgtaaatttgtttgagttcattgtagattctggatattagccctttgtcagatgagtaggttgcgaaaattttctcccatgttgtaggttgcctgttcactctgatggtagtttcttttgctgtgcagaagctctttagtttaattagatcccatttgtccattttggcttttgttgccattgcttttggtgttttggacgtgaagtccttgcccacgcctatgtcctgaatggtaatgcctaggttttcttctagggtttttatggttttaggtctaacgtttaaatctttaatccatcttgaattgatttttgtataaggtgtaaggaagggatccagtttcagctttctacatatggctagccagttttcccagcaccatttattaaatagggaatcctttccccattgcttgtttttctcaggtttgtcaaagatcagatagttgtaggtatgcggcgttatttctgagggctctgttctgttccattgatctatatctctgttttggtaccagtaccatgctgtttcggttactgtagccttgtagtatagtttgaagtcaggtagtgtgatgcctccagcttcgttcttttggcttaggattgacttggcgatgcgggctcttttttggttccatatgaactttaaagtagttttttccaattctgtgaagaaagtcattggtagcttgatggggatggcattgaatctgtaaattaccttgggcagtatggccattttcacgatattgattcttcctacccatgagcatggaatgttcttccatttgtttgtgtcctcttttatttccttgagcagttggtttgtagttctcctttaagaggtccttcacatcccttgtaagttggattcctaggtattttattctctttgaagcaattgtgaatgggagttcactcatgatttggctctctgtttgtctgttgttggtgtataagaatgcttgtgatttttgtacattgattttgtatcctgagactttgctgaagttgcgtatcagcttaaggagattttgggctgagacaatggggttttctagataaacaatcatgtcgtctgcaaacagggacaatttgacttcctcttttcctaattgaataccttttatttccttctcctgcctgattgccctggccagaacttccaacactatgttgaataggagcggtgagagagggcatccctgtcttgtgccagttttcaaagggaatgcttccagtttttgcccattcagtatgatattggctgtgggtttgtcatagatagctcttattattttgaaatacgtcccatcaatacctaatttattgagagtttttagcatgaagggttgttgaattttgtcaaaggctttttctgcatctattgagataatcatgtggtttttgtctttggctctgtttatatgctggattacctttattgatttgcgtatattgaaccaagccttgcatcccagggatgaagcccacttgatcatggtggataagctttttgatgtgctgctggattcggtttgccagtattttattgaggatttttgcatcaatgttcatcaaggatattggtctaaaattctctttttttggttgtgtctctgcccggctttggtatcagaatgatgctggcctcataaaatgagttagggaggattccctctttttctattgattggaatagtttcagaaggaatggtaccagttcctccttgtacctctggtagaattcggctgtgaaccatctggtcctggactctttttggttggtaaactattgattattgccacaatttcagctcctgttattggtctattcagagattcaacttcttcctggtttagtcttgggagagtgtatgtgtcgaggaatgtatccatttcttctagattttctagtttatttgtgtagaggtttttgtagtattctctgatggtagtttgtatttctgtgggatcggtggtgatatcccctttatcattttttatcgtgtctatttgattctcctctttttctttattagtcttgctagcggtctatcaattttgttgatcctttcaaaaaaccagctcctggattcattgatttttttgaagggttttttgtgtctctatttccttcagttctgctctgattttagttatttcttgccttctgctagcttttgaatgtgtttgctcttgcttttctagttcttttaattgtgatgttagggtgtcaattttggatctttcctgctttctcttgtgggcatttagtgctataaatttccctctacacactgctttgaatgcgtcccagagattctggtatgttgtgtctttgttctcgttggtttcaaagaacatctttatttctgccttcatttcgttatgtacccagtagtcattcaggagcaggttgttcagtttccatgtagttgagcggctttgagtgagattattaatcctgagttctagtttgattgcactgtggtcggagagatagtttgttataatttctgttcttttacatttgctgaggagagttttacttccaactatgtggtcaattttggaataggtgtggtgtggtgctgaaaaaaatgtatattctgttgatttggggtggagagttctgtagatgtctattaggtccgcttggtgcagagctgagttcaattcctgggtatccttgttgactttctgtctcgttgatctgtctaatgttgacagtggggtgttaaagtctcccattattaatgtgtgggagtctaagtctctttgtaggtcactcaggacttgctttatgaatctgggtgctcctgtattgggtgcatatatgtttaggatagttagctcctcttgttgaattgatccctttaccattatgtaatggccttctttgtctcttttgatctttgttggtttaacgtctgttttatcagagactaggattgcaacccctgcctttttttgttttccatttgcttggtagatcttcctccatccttttattttgagcctgtgtgtgtctctgcacatgagatgggtttcctgaatacagcacactgatgggtcttgactctttatccaacttgccagtctgtgtcttttaattgcagaatttagtccatttacatttaaagttaatactgttatgtgtgaatttgatcctgtcattatgatgttagctggtgattttgctcattagttgatgcagtttcttcctagtcttgatggtctttacattttggcatgattttgcagcggctggtaccggttgttcctttgcatgtttagtgcttccttcaggagctcttttagggcaggcctggtggtgacaaaatctctcagcatttgcttgtctgtaaagtattttatttctccttcacttatgaagcttagtttggctggatatgaaattctgggttgaaaattcttttctttaagaatgttgaatattggcccccactctcttctggcttgtagggtttctgccgagagatccgctgttagtctgatgggcttccctttgagggtaacccgacctttctctctggctgcccttaacattttttccttcatttcaactttggtgaatctgacaattacgtgtcttggagttgctcttctcgaggagtatctttgtggcgttctctgtatttcctgaatctgaacgttggcctgccttgctagattggggaagttctcctggataatatcctgcagagtgttttccaacttggttccattctccgcatcactttcaggtacaccaatcagacgtagatttggtcttttcacatagtcccatatttcttggaggctttgctcatttctttttattcgtttttctctaaacttcccttctcgcttcatttcattcatttcatcttccattgctgataccctttcttccagttgatcgcatcggctcctgaggcttctgcattcttcacgtagttctcgagccttggttttcagctccatcagctcctttaagcacttctctgtattggttattctagttatacattcttctaaatttttttcaaagttttcaacttctttgcctttggtttgaatgtcctcccgtagctcagagtaatttgatcgtctgaagccttcttctctcagctcgtcaaaatcattctccatccagctttgttccgttgctggtgaggaactgcgttctttggaggaggagaggcactctgcgttttagagtttccagtttttctgttctgttttttccccatctttgtggttttatctacttttggtctttgatgatggtgatgtacagatgggttttcggtgtggatgtcctttctgtttgttagttttccttctaacagacaggaccctcagctgcaggtctgttggaataccctgcagtgtgaggtgtcagtgtgcccctgctgggggtgcctcccagttaggctgctcgggggtcaggggtcagggaccacttgaggaggcagtctgccgttctcagatctccagctgcgtgctgggagaaccactgctctcttcaaagctgtcagacagggacatttaagtctgcagaggttactgctgtctttttgtttgtctgtgccctgcccccagaggtggagcctacagaggcaagcaggcctccttgagctgtggtgggctccacccagttcgagcttcccggctgctttgtttacctaagcaagcctgggcaatggcgggctcccctcccccagcctcgctgccgccttgcagtttgatctcagactgctgtgctagcaatcagcgcgattccgtgggcgtaggaccctccgagccaggtgtgggatatagtctcgtggtgcgccgtttcttaagccggtctgaaaagcgcaatattcgggtgggagtgacccgattttccaggtgcgtctgtcacccctttctttgactcagaaagggaactccctgaccccttgcgcttcccaggtgaggcaatgcctcgccctgcttcggctcgcgcacggtgcacgcacccactggcctgcgcccactgtctggcactccctagtgagatgaacccggtatctcagatggaaatgcggaaatcacccgtcttctgcgtcgctcacgctgggagctgtagaccggagctgttcctattcggccatcttggctcccacctcccgaactcatccttttttatggctgcatagtattccatggtgtatatgtgccacattttctttatccagtctatcgttgatggacattttggttggttccaagtctttgctattgtaaatagtgctacagtaaacatatgtgtgcatgtgtctttacagtagaatgatttataatcctttgggtatattcccagtaatgggattgctgggtcaaatggtatttctagttctatatccttgcagaatctcctcactgtcttccacaacggttgaactaacactctcaccaacagtgtaaaagcgtgcctatttctccgcatcctcgccagcatctgttgttgccagactttttaatgatcaccatcccaactggtgtgagatggtatctcattgtggttttgatttgcatttctctaatgaccagtgatgatgagctttttttttttttttcatatgtttgttggccacatacatgtcttgttttgagaagtgtctgttcatatcctttgcccactttttgatggggttgtttttcttttttttctggtaaatttgtttaagttccttgtagattctggatattagacctttgtcagatggatagattcagatcagagctttaacagccagactttacagggaaaaggctgagtggcacctcctttatatgaagaaaatgttcttctccaacccacttgtgttcagtggatggaagaagctgttcagtaattataactgacacttgtaacacataactgattgatttaatgcccataaattttattttctttaatcgtaagatgtgaccgttaaattcttagaagacatttggctagtggattaataattaaaagaatattggatgaattcatctgcttcctattcagcagttcttttatttataaggctatttttctcaaaatgaatgatcatgaatatctaagaaaaaacaaaatatttagctgtttgaagatgaaattattatcttttgatgttgttttctttaaagtgtttacaatgataactaagtggtagggcttcttccctctgttactctaagtatgcctcgtatacatcctcaaagcattttttttttttttttttttggagacagagtcttactcggttgcctaggctggagtgcagtggcatgatctcagctcactgcaacctctgtctcccaggtttaagcaattctcccgccttagcctcccaagtaggtgggattacaggcgtccgccaccatgcacggctaatttttgtatttttagtagagacggggtttcaccaagttagccaggctgctcttgaactcctgacctcgtgatccacccacctcggcctcccaaagtgctagattacagacgtgagccaccacgcctggccacctcgaagcatttgtaaaagagcaaggtgatggggttcattaggtgtttggtatttgaaattaaatacctctgttattgatgaagccatattttaaatattatcaccactaaactcagttaaatatttccactgttaactacaaggttcaaatgcttggatattatagaagatatttgacttcaaagataaacgctacaattttgggtcataacaaatagcttttagaaggggaaaaaataagtcttgggaggaaaataagcagtctcttagtttaatatagcggttggcaaatatagatgcttaaaagttctgaaaatccccattgcaggccatcagagtgttgtaattaagtattaaattaattcagataaaaggataatccatcagggccactaatgtagtggaagtgtggtttcggtgtgattagtctcaccatggaagtcaaagaaagtcccactcagaatgaacaatgaaagaatcatatttgtctctgggtattttgtcataggctcaattgcccagtgccagtgtgtaagccactggtaaaatcctgagcccttagtcatgtctacaggtagctggctgccttagacattttatgatgacgaaattgaattccacttctgataatggtaatccatcatgtctacctctttttttctcttaaaactacactgacggccaggcgcagtggctcccgcctcatcccagcactttgggaggccaaggcaggcagatcgcctgaggtcaggagtttgagaccagcctggccaacatggagaaactctgtctctactaaaaacataaaaactatccggtcatggtagtgtgtgcctgtaatcacagtactcgggactgaggcaggagaatcgcttgaacccaggaggcagaggttcgttgttctgaatgacatagccaggggtggttatttctaaattttctgtgttgaattaagataggaatgtggatttcttcctattttgaacaacgaccaaaaaaaaaaaacgaaggctaagtgtgtttcactctgctaaaaatgtaccttttcttgaatctgtcactttttcacttacattttctgaaaatgaatataattaaccaccatggggctcagcatgctggtggccatttggaggaacttttctaccaacagtgtaacagagaaaagagaaaagggtactacagcgtacctcaacctcccctgactgttctgtgaagtacaagtgtaagatttctcactgtgatcttttgctcctctgcctttttactgccaagggctaagatgggcacagggccctttccagctgcccctgcctgagaaatgcttatttgatgaccaaaagcaataaccattccataggactaacggtgattaagtcagcttacaaatccacaagggtggaagagactgctaaagatattggaacagacatgcttaataatgcctaatttctacagctacttttgtgataatacgagaggctgaaatagataggggctgaacatgggaaggctggtgttatgaagcccaggacttggatttcagcactggtgcttactggccattgggtcttgaagagattggttcctttctcccagcctcagtctccttgtcccatcagattaataatgcctgccttgggagaggagagtcatacaggagagggcatttgagctgggctctaaagagttcaaataacgtagatgagcagagatgggcttccaagatagcaggaatagaaaacaaaagtgtcagaatgggtatgcatggtcttttgtgggaataccccaagctatttagcctgagagagaggtgtggtgtagacagctggagctgtgagttccatggctagaaatacggggtgggcccagaccacagagggccttcagcatctggcaaaggagttggaattaattcggtagaaaatgaagacccactgaaacaaagagggagccattcttgtgtgtcaggaactaagatttcaggaaccaaacgtaaaataaaaaccagcagggagaccattgtctcagtcggtttgtgctgttatcatgataccagagactgggtaatttataaacaaacaatagaaatactacaattctggaggctgagaagcccaggatcaagccgggtgcagtggctcacgcctgtaatcccagcactttgggaagccgaggcgggcggatcacgaagtcaggagatggagaccatcctggctaacacggtgaaaccccgtctctactaaaactacaaaaaattagccgggcgtggtggcgggcgcctgtagtcccagctactcgggaggctgaggcaggagaatggcgtcaacccgggaggcggagcttgcagtgagccgagattgcgccactgcactccagcctgggcgacagagcaagactccgtctcaaaaaaaaaaaaaaaaaaaaaaggcgccttgtggctgcatcctccagaggcagcaaaaactgttctcacatggcagatgcacataaaggggcctgtgctggtttcctctagcccttttagaaggcagtagtccattcgggggcacggggtggaactgtcatgacttgatttccagaagaccccatctctcactactaccacagtggagatttaagtttcaacacatgactttgggggacattcagaccatagcaagcagtgaggagactatcgtaattatccaggcgaaaagtaatcatattcctaggggcggtgagggtggtgtggaaaagcaagcaggaaatggctgagagaattcagaaatagaatgcaaaaggatttgtcggtagtgtgagtactggacacgaagaaatacagggagtcctggatggctctgaaggattcaagcctgtgactgggagggagaatggttctgccatgattagaaaacaggaaaggtggaagggaaagccagggaccttgagtacagttgtgtacctaccaagtgcatggatcaggagggagccctaagttggtatctccagcaaactgttggaaatatacaaatttgagtgggagggagaagtcaaagctggggaagtacatttcagattcacccaaaggtaggagatctttagagtttcaagagtcgatgggatttccaaaggggagaattgtagaaagagatggaaagagatacaagaagaaaatgacagggatgaagagaggagaaaaaaagagtaaaaagagttattcagagatgtcacagggaagaagataagtactgtgtatgcgaaacagtgagaacatttccaaataaaggacatggtaagtgatagtagataccacagacccaagaacagcgtagcccctggggagttcaagagctttctcgctggcaaaggttatttcctgtcaagatgaatgtgtatgcaccaataattattagtattccagaatatcctctctttagcatagtaagtgcttaacagtcacaagcaaaagatttatataaaagaaatgctcatttaatttatttaatcagacattggctaagttattagccgctacctatggctttgtaaaacatgaaaaagttggaggaaatctaatgagggtcttttatctgtaagggaaaggtcatcatgggcatcaagtattgaattttagaaacggtgccacagtgaatagggatatattataactcagattagacttcaaaaggactaatttgcttgggacttccatcatttaaaatcacttgcaataaaactgactacatgaaaagatattaatcacaagctttaatgctattccatcaaattattttaatgggtatatttgaacagaattttaatttttcagatacattttttgtcaatagaaaagagaatttgaaagatgattgtaaaatgttacaaatcaaatttaaatcctgatcttattttcattttctctagcaataaaactaaccagtgatgtgtctgaaatatatactacagcaaactcttgacacagctatgattggaaaatgagacattttggttaatcaaatattattgttaatagtgcagtgctgtctgtcggtctctaatttgtaaaaatcagagaaaaacatggtgaatctttggtgacataagagaagactcacaaatcttcatatcctggggtcagtttttaaagcagtaattacacatgatacaagattatattctaagctctctttttccagtaagaaaagataagtcaatgatgttccataaagctgattcttgtttaatcaatttttaaagtgggggggtaggcggcactgacagcattctttggaaagggaagcaacagaggagaaaggcaggatatttggtgtctgctcacattgggaaatacggggagccaggggtggttaagtccagagaaggctggatgtctgtctgcagggctacatctggaagggcaagggaacagtttccttgttgcctcagagcataggtcatgcagcacaagaggagcatttaggaaatgcagattttttttcaaggcaagacagtgaaaactattcaagaaggtagcaaactactggccctttaatgcttttcttatccttgcaagtgtgcaaggcaagacaggagattgtctgttgtctttcagcttgaatgagattgtgcctcacttactgccgccacaccaaagcctggcgtttattcctgtgcgatcattgtatactagggacgtctaactgtgtcaggaggaaatggcagctgagcccctgtggcctttcacctctagcagtgccacgctgcagcacattggccggctgccatgctcctgcctgcagtcctgccagcagctcttgtgagctgcgactttgcataagtagcttgaatgccatgtgcctcagttttcacatctgtaaaagggagatgataatggtacctatgtcatggctctaaacgcgatcatgcacgtgaaagcagttgaagtcttgcctggcagaagtaaatggtggctgctgctgctgctgctgttgtgattgttgttactcaccaaagagatggttttgtttggtttagatgagctgcttcagaaagagcaaaactattcagatgacgtcttggccaacatgattagtgaaccaaggatcagttacggaaacgatgctctcatgccatctttgaccgaaacgaaaaccaccgtggagctccttcccgtgaatggagagttcagcctggacgatctccagccgtggcattcttttggggctgactctgtgccagccaacacagaaaacgaaggtaagagtcccctgagccagcaagggcgttctgggaggtatatatacacatacataacgtgtgtgcaagagagagagttatcttttgtatgttcttgagtggtgaattttttttgatgtagtcataaatattttcattataattttactttaaaaagtaaatactaggagttactatgtcattaaaataatatatctgtgtaaattattctttatattttttatgctgcaaagcatgtaaactgccaattgttggaaaagacaacaactccattgtataggtggcaaaacaaaatggtaatgatttacataacatttgcaggtaaagggcctcttgtttcgcacatgtccaggtttgcattctagggaatattatccttcgagtgaacactcccggacgaaggggagccacagtgtattattgaagaggcagttcttcacaaggaaaatgtgtggcaataacattcttctaatttttattttccagttcctcttcttaatataaaatggtacattatataacaaaagtggatacataaagagcatgtactgtatatcatattattatgtttatgactttttcaaatgaggaaatggaggcaccaggagactaagttcttaagtgatgacttttggtaggaattttttagaaatgttttttaactgtgaggtatattgttccctctggaatggaagcacaaaattcaacttgtgtttatgacgtaatgacctagaatgccaccttccaaaaaagcagatagatagtgaaataaggaaaaattacagtttaccaacagagaggagttttgagggcctgcagagatgcagatttgacaggcaccaaagtagtcttcactggctacttattcttacatgaaatttcagattgaattaaatgttaaaggcaaagatagagaactacatataaataaaatttaattttgcttaagacttaatttgtgtttagaaaattaaatttaaggcagctgccaaaattaaggagcacattgctctaaatgttttttcctttggtacctcagagaagtaagattcttctctatcaacaaatttgagcagtagatggcatcctttttcacagggatttcttagcagaaacacctgttcaggcaagaatatctttcagcttcttttatctttttctacatgttcagaagtatacaattacacacaaacaccttgatttctagatacaaataacatgttttttaagaacacaacagcactttacctgattttctttatcaaagcagcaaatgttgatggagatttcatatttataatataccttataggccaggcatcgtgggtcacgcctgtaatcgcaggacttagggaggctgaggtgggcagatcgcaaggtcaggagatcgagaccatcctggctaacatggtgaaaccccgtctgtactaaaaatacaaaaaaaagttagccgggcgtggtggcgggcacctgtagtcccagctactcgggaggctgaggcaggagaatggcatgaacccgggaggcggacgtggccagtgagctgagatcacaccactgcactccagcctgggtgacagagcgagactttaaatttaaaaaaaataaataaataaagtaaaaaatatatataccttataacatgcaattagtactaaatctaaatataatattagaccttaagtgtactggacaagttttttctaaagaaccattgcagaaaatatatagactattttcacaatgtgaatcatcaccccaaatttgtttccttaatttgaaaaagggcaccttacagtaatagcaaacagcatgttactgacaatgtaaaaataattaaaactttaccatttatgaaaataattcttaatcacatagaagaaaacaattttagggacagttcattatcaaagacctggaaaactgtcctgttaaatgtattgagtgcagattgttttgtttctttacaggtagatagattttggtcattgaaggtcctcttcattcagtctctaatgagaatttttagtgaaaaatgtccgatctcattttgtaaattgaatgcacgctaaatttgctcttttactaacagcataccttgttgcatcagccttaggagaaaatctgcgtgcacacgtgtgaatgtacacacacacacatacactgtgaacccttggtaattgccaggatgtccatttgagcaaagcccttgattaagtacttctggatacttgacaaacacgcagctattacattgcctaggtctcatgaaaagagctgatattcttgttggatgattctgtttgaacagtagaatctggtataacaattttgggaggcaatagaacttgcagtgtcagagtcttgagttgcagtactcttcattatcagtcccaacattgacatatatatattgattatagcaaacaatttaaaaagccacttaagcaatttttttttttttttttttttttgagacggagtctcgctctgtcgcccaggctggctggagtgcagtggcgcgatctcagctcactgcaaactctgcctcccaggttcatgccattttcttgcttcagcctcccgagtagctgggactataggtacccgccaccacgcccggctaattttttgtatttttactagagatagggtttcaccgtgttagccaggatggtctcgatctcctgacctcgtgatccgcccgcctcagcctcccaaagtgctgggattacaggcatgagccacggcgcccggccccaattggtttttaaataaaatagacggccatcatctcataggatattaaatactaccccatacccctgaactcctgaatgatacagacccgagtttaaattccagccctgctatgtgcttctgagcaagttacttagcctctctggctgcttcctcgtctgtaaaataaggttgacaataattcctaactcagaggtatagtatgagcattaaataagaaggcataaaaaagctcttagcaaaattcctggaacgtagtaaatgtcagtggtagctttttttttttttaatggagccaggatcttattagagagactttatcagcctgtctcaagatgaatcaccttatggcctcaacaatgtatccttaaaataatgaatataataagccatataatgagatacagtcctaaagccgtctctcttctaacaccgtctcccacctctccccagaaacttgttagtctttctttgtacagacatgtgcacacacacacacatacacccaactactgaaaatatctaaaattctcaaaggatttccttttgttcttcatgcagtcctcattatcatagtttcaaatgcttaccaaaaatttgttgtttttcttaagaacaatcagtgaaatccagaggaggttctgatgcccattttttaaatttacattgaagaaaataagcatatcagagttttccaatgtgctgtgatttgccttaacaattttttattctttggttttcacatccacaaaacctaaatgaatggctaggctgaaatgaagctgttgttacagaattgtgctcacagatcgtgaaatgatctggctggaagcattagcgttgatgacatttgtgtttgttctactttttcctgactgcctgagaagggcagccacaaagagcagcatagcatgcagtgactgccagcaagtctttgtggccaacagtctgcctctttgtagataatacctagatataatatgtagataaaataatatttttaaagagacaaagcaggtcttataagacttgtatggatgtatttgcaaaatgtgaagctgccttctagtatatttttaactagctttatagaggcaatgaggaagccaatttaaatgttgaaatttagattaaataaatatttcattaaacttacaaaccagttcttgtcagcctcttatctatatgtaaaactggtgtactgctgattcctcattacctttggcctggtagagagtttgtacaaggcagcacggttaatagttgaggtttattacaaagaataccagaagtaacagactcaaaaatcccagaggtctgaccattctgtttctctcctcttacagcaaaggatttgattcaaagctactgagagcaagagaataactcatttctgcttacattttattttaactctattaaaagttaaagctaagataatgtatttcttgtttttaaattactaaacagccaatgtaagatgttttttagcacttcattgatgaagttactgtctggttaagtaaaggtcaattggaaaaattggaaagtatttgcagtggattgggaaataacacactactttgttttgttggtgtgtattcttttttttcggcaatgatatcataattgccttttaaaaaacttttaatgtctgctccctgagctacttattttttgagcattaatttatactaaatcagcttcaatcttttaaagcagattagggtttatgtcactgaaactagttttgtttaatcttcctaaaaaatagggttagggttttattattgtttttaaataatacatgcctatttaaaaaaatagaagaagaagaagaagagcggggagaggcagagaaacttataggacaatatcatttgtaagtttctttcacataagtatacgcatttgaaccctggaaaaaccatttactttgtgacacaactgaagttcagaaagaatgtgattagccccagatcacagagaaagtaagtggtgacattagcagtggcccgtgggactaccagctcctcagcctgcatttaaaccacaggtacacttaacttactgccccgagttgcatatacattttctaataacgtaactattgatgtatgtgctcaccaccacttcaaggtacgcgtttgccctcgtgcatgtggtctgttgtgttcttaactgcagttgaagcactattgggtccctcatcatcaggaaattctcacaaagtacaatgacctttcaactaactgcattttacaaggagtaatacagttactcattacaggttgctgcaaataggaaaaaaaatgaagtatagaaaaaccaaacctcattgtcgaaatgtatttgggagttgcagaaggaagtgaactatgtcttcctctaatgcactagtgaaatactagagaatagtcactctcgcatcagtagttactatggaatatttaatcataggatatttaatcagtgcagttctgtagtatctggtagggtctcaaacaggctttaaaggttacttatttgttcctcaccataattagaagatgcagatgttaacatttctgtttccatatggagaaacagccacagaagtggcgcatcccaaggccacagacattgtaaatgttgggcccaggcctgggattagatgcctcaccctccttttgactccaccatgctgccagtctctacatgagaaaggaccaaatttttatttcatccaaatatcctagtgctcccggaaatattttcttatattttggagacttggcttactgccactttttttctccctcactgtttctattaacatgtggcatccaaaatcgatttggactgagaatcccacctttgaatgcctggcctgtgtgcatcagtaagctggatggttttgctgaaattgttagaagccatttcatcgagcacaccgtgtctccttcagcacctgtgctcactttgtcttacctttttccctttacacttgccaccttaccaaagcagcttccccctgcacctacctccgtggcttcatttaccctatgaccattattaatcctaaaaacttcacttttgtccccattccttgtttcttcaaacgccagcgtaaaacaaggaagtattttctgagcatcagaagtgctttggaaaggtcagatgatggtgaggaatatcatgctgtccacactgctttctttgggtcggacccagaacacataaaaagggaaaattgtgaacaatggcaaatataaaatgaaatatcctcatttcacacgtttcagctgtatgtcatctgtcaaatggaagccagcctttttgaaaaagtgagaaaaagactgcggtttccctcttctgccctcatactaaggacaaatttgattcactcactaaatggcagattatatagtaaaactttgctctcctgataaattcatatttgcacttcccctggaaatttaacagagtccttttgtagttaattaactgtaaaataagataagattgggcagttgtaaaaggaagtatctttaaggttttctgctaggctgggaatattttatttctaatcaaaagccaagaaactatctctaaactagctcagagggaaatccaccctccccacccctcttctttgatgttgctgcgtatcctggtgagggcttttattagaaaactaaggagcaggactggcacatcaatagcgataagccatttaaagtggtgcccctcctggtcctcgatgctcgggattaactcactgtggttcttttctggctgctccttttttgtaacttgtttattgcatatgcttttttccctgctcgactatgtttgggagccacgacttaccatcttgatttgtcttgtttgctttctgtgtcccttgcttcctgtgcccagttgagcctgttgatgcccgccctgctgccgaccgaggactgaccactcgaccaggtatcagaaccgcttgacttgtgcctctccgcatcttgggcctaagctcgagcagacgttgtctcctttctgcattttaagcctctctcaattgtacttactgcagagtagaatttgaagtgaccttagaaaccaaacttttaaaaattccccttgactattccttactcttcatttcccaagttccgagtgaaatgattttttttgtttctgagctttccctttgaaacctaaaagagagcccttccaaatttgggtttttttttttcttttttctttaaaacaaacaaaacaaaacaaaaacagagacgattatatacagcctgtccttaaaaacagaagcccagatagatgtagactctcaggtgatgacttggataccagtgtgaacatctctcctttcttgtttggtgtccagatgggtaattttctaactgaactgggctcaaacttcaatcagttactgaagtagacatgatttcctgaaaataccagaattggtttctttccagagcccaaaatacatcttctgttttgtgggttgtatgtacttattctcaatgagtggctaaagtaacacaacagatgtggatgcataattttgcacataagccctttttttatgtattacttaaaaatcccattaacactgaaatagacacttctttttttacagtttcacaaacattaagaagaaacacatttttattttatgaataatgtcatagcacagcagaagcatatatgtgcctggtgtctactctatgaacaacctcacccaactgatagtagccagtgctttcagtgaatcaaaaagaggaagaaagttattgaattgacaaatttgtgtattccagggagattttaatcccaaataacacatacttttccatatttattttcttctttatcctcataatgtccccaggcgatagtcaaagaacagggaattaactttctttgaagatattaatacacagaggtcaacctttgctgcctggttcagatacagtcagcagcagaccaggagacccaccctgtccctcacacttccaccacaggctcgagccatgactgcctccaagcacggtcactgatgaagactgagagtctgcctgtggcatcttcatgcctttatgctgtgattaacagtggcagcagagacagtagtgtgacacgtcttgacagctggtctcgttgatttatgaatttctgtctgtaggcttttaaggggaacttaaattatagtgagtcagagacagtttcagttcttctaatgtcctccttattgtcaatgtcatgtaagggaatctcaaggagccaggagttgacattcctgttctgctcagccaacttgtaaggcctcgggctgagggtcagttcagttctaattgcaaccacagccagctcaggttggtcatttgccttgggacttttttcatggtgcttctctttaaaagacatgctcttcatctacaagcataaaatgtaacttagaaagcgctcattcgactcattcaattttatcaaatttctacattgggccaggagagcctatatgttactattgaaacatccaggaccaggtgacactaccagtcaatgtttttttcttttttaaaaaaattgttttttgattttttttttttttttttgagatggagtctcgctgtgtcccccaggctggagtggagtggcacgatctcaactcactgcaacctctgcctcgggggttcaagcaattcttgtgccccagcctctcaagtagctgggactacagatgcgccccaccatgcccagctaatttttttgtattttcagtagagacgggatttcaccatgttggccaggctggtctcgaactactgacctcaggtgatccacccacctcggcatcccaaagtgctgggattacaggcataagcaccatgcccggcctattcttttaaaaaaaattttttttaatctaaatctaacaaaaaggacacctccaaacgctgtcaaacaaaaacagtgtgttttaaaggaagagctagagaatagttaatggtattacactggtgggagaaaaccatccaaaacctttctcataacagtaagaatatgatgtcacttggggatttcacaaagatcaatccactaaattctttctaggtttgaaagaaattaaacggtagggtccctgctctcaggagcttgaggtataatagaaggaattttgcatatttggaaacatgagatggaatttggaagacaaggaaatacaaagcaacattaagtgctaacaagaatgttctgtgatgggaggagatggagtactaacccaggggcatgttaagtagagaacttactggagatgggcttccagagaggttatgaaagatttgaggcacctggattggcaaagaagaagggaacaattctattcagaagagagggtggcctaagccaagcttcctttcatacacagcgtaggcttgggttgcccagtaagatggctaaagttgagaaagaatgctcagatatgaagtgaggaagattctagttaaggtttgtctatgaatagcagtatttactgcacatgtattaagccatgcgtgtgttctgtttttgtgcttgtagtaagtttatcaaacatttgggctaatttccccgtgttttgtagcatagctttggttcttcttcacattttagagaccacccacttgagtctaatgtgccgaattatatctttagcctttccaaacttagaaagccttcccaagattgtcatgccgttcaagtgatggcattgtttttgaataatcactgttgtcctcagaaacaagttaaaaaaaggtttttgtttttcccccacccagtgctttataatcatgactgaggaaaatggcttctccttaactctcatatctaaaaaaacagaatatggtagcttccagcatgcagtgtcaagtagggaccattgtaataacagtggtgatttgggggcatagtggccattatagctcctcctcctggcttacttccaaagaaaaaatagactctgaaggactaattatacagtttgaccagaataaaaaagaaaaacacattagcgagctcttcacatagggtagaaagctaccctttctgttacaattcatcaccacccttctgcagtccaaataaagggaaaccaggtccttgacccgagccatgcaagaggtgtcatgaaggacatacctcccttagcccccacatgaacaaaaggctctgtccactcatcatgacttacaggaagagagagctggagtcaccagggcttagggtgaaatcagcacaactcaagaaagacctctaagtaagcctgcaaaccaaggtccctgccatttatttgaaactactcatcacattttattacatgcattatcaccttattatgaatatttccctatgtgccagcttactgattttgtcttttagtaagatttgcttaatgtaaaaagtcttccctagatgactattcatgctaaacaaacatgaactattatagcaagagctcttctgccaagagcttctcaaactattgagctgtaaacatgaatttatctgtcatgctgacttgataatatgaatttttttttttggaccaccaaaagtattcacagtatcatttcaaaagtagtgtgggcttgtaaagtttttagtggagagctcttggttttgttttttttttttttttttttttaaaacaggatttgtctctgtttccaggctggagaacagtggcatgataccagctcactgcaacccccatttcctgggctaaagctatcctcccacctaagtttcccatgcagctgggattacagggatgtgccaccacacctggctcatttttgtatttttagtagagacagagttttgccatattggctaggctggtctcgaactcctgagttcaaactgtttgcccgcctcagcctcccaaaggctgggattacaggcatgagtcactgcacctggccgagagctcattctttttttttttttttttgagatggagtctcactctgtcgcccaggctggagtgcagtggcacgaatctcggctcactgcaagctctgcctcctgggttcacaccattctcctgcctaagcctctagtagctgggactacaggtgcctgccaccacgtccggctaattttttgtatttttagtagagacggggtttcaccatggtcttgatctcttgacctcgtgatcctcccgcctcggcctcccaaagtgctgggattacaggtgtgagccactgtgcccggccagagctcattctttacttttatttttcagtataaatatttggctccaaaatctaaaagggaagactcttcaaactgttcaagaaagttttcttaaaaatctcagaaatatagttctaacctattgtgttgctagatcttttatttatttatttatttttggagacagagtctcattctgtcacccaggctggagtgcagtggcacaatctcagctcactgcaacctccacctgccgggttcaagcgattcttatgcctcagccttctggagtagctgggattacaggcacccgccaccacacctggctaatttttttttttttttttttttttttttttttgtatttttagtagagacagggtttcaccatgttgaccaggctggtctcaaactcctgacctcaagtgatccacccagcttggcctcccaaagtgctgggattacaggcgtgagccaccgtgcttggcacgttgccagatcttaataacagaaaaggagtgagctctaaagaaatcactggttatataaggatctcagatttaaaagggctatagaaagattaaaatatacagccagtgagaattaagagagttttagcatcactaccctataaaaataagtgtcagaaaggttcgtttcagcagaatgagttgaaacttaaccaaaaaatacttaacaatattaaagtaagaaaataaataagaatagagaactctgtgggtctcgtagcaagaagttgggggttgagggttaggtcattgagaggaccagagttaaagaatgagaaagggaaactgtcccacttccattgtgccttttatgtctatattaaagagaatgaacttctgatgaaaggaaattaaagcccgagatagatcaacatgagaaaagaaagccctagcccattagttacctattgctacgtagcaaataacgcgagaatttagcagcttaaaacaacaagcattagtttcttacagtttttataggtcaggatttgggatgtggtttagctggatggttctggcacagtgtccgtcatgtggttgcagttaagacactgcctgagctaaagtcatctgaaggtttgattggacctggtgggtctgtttccaacgtggctcactcacgtcactgttactaagagacctcagtatcttaccatgtgaactctgtaatgctgcttgagcgtccctacaacatggcatctcgcacccctgcaccaagaggtccaggaaagagattaaggaagttttagtgccttttttggcccagtctcagaagtcatacaccatcacttctatcatgctctgttcactagagcaagtcactacatcccgaccacattcgaaggaagggaatcaagttctccctcttgaaggaaggagtatcagcaaatttgtggatatattttaaactatgacatcttgctacccaagtccaagttcttatgacccagaccaactgcaggctaagagaacttgaaggggaagtagcaccattgcctgtggtctttgtggaaagctgggaaggtagggataggaaaatgaagttctgaatagcaaaaaggagagaagatagcttcacaatctgtaagccaggtatagagtgacattgattgtgggtctcttttcaaataggttatcaagtggaagctttttgaacaattggatgaggaaatggtgctaggtcacaaccagcgtggatttcctaggttttgtcagattatccttaccttctccttgtataggctgtgctcttagactggcacatcatatgctgtggacattgtgcttttcagtgtcagcaagatgtgtcacaagtttcccagaatctcgtagacaagattgaaagagtgattaggccaagagcaggaagtgaattcccctgggagccaaaggaattgggaatgtgtagcccaagtaagacaagaaccagcaggaacatgcctctccttagggtcgtgatacctgttcaaggttttaatgtggaagggaggattaggcttgctctgtgttgaatcaggctcaaaggatggaagttacagggaagctgattctggcttcatgtaaaaaaaggacagtttgggcaggcaaatctatcaaaaaatggagggaaattgatacattcctctatgttcaaacaggaactgacaatctgcccctgggtgggaacacggtagagaagatgacttcaaaagcccttttcatcctaaaattctgatgtttgataattaaatgttatagcatggacactgacatttacattttttacttatgtttttggtttttaaatgactctgcattttgttttaagcttcaaattattatttgaataatgaaattcatcagaacaattagtgttaagaatcatatagcaatttatagaaaaggaagagttcgtaggttataaattctgttagttgctaagaagcatttttaaaattatgtactatagctctttattcagcagacgaaccaattacaatctgtgtaactagaacacttgactaaaattatataatttttacaacgcttcactgcatagatacatgaacataatttatttgtaattggaacaaagccccaaagtagcagttttgttctaccaggtaattaatgctcatttttaaagccttttattattatttctgaagtaatgagtgcacatggaaaaagacacataataggctaaacaataagcccgtaagccaagccaacatattccaggaacaaatccttgccaacctctcaaccaggatttaacttctgcttttcccccattttcaaaaattatagcatgtatttaaaggcagcagaagccttactttcaggtttcccttaccctttcatttctttttgttcaaaataggtagtaattgaagttttaaatatagggtatcatttttctttaagagtcatttatcaattttcttctaacttcaggcctagaaagaagttttgggtaggctttgtcttacagtgttattatttatgagtaaaactaattggttgtcctgcatactttaattatgatgtaatacaggttctgggttgacaaatatcaagacggaggagatctctgaagtgaagatggatgcagaattccgacatgactcaggatatgaagttcatcatcaaaaattggtacgtaaaataatttacctctttccactactgtttgtcttgccaaatgacctattaactctggttcatcctgtgctagaaatcaaattaaggaaaagataaaaatacaatgcttgcctataggattaccatgaaaacatgaagaaaataaataggctaggctgagcgcagtggctcaagcctgtaatcccagcactttgggaggccaaggcgggtggatcacgaggtcagaaattcgagaccagcctggccaatatggtgaaaccccatctctactaaaaatacaaaaaagattagctgggtgtggtggcaaacacctgtagtcccagctgctggggaggctgacgcaggagacttgcttgaacccaggaggtggaggttgcagtgagctgagatcgtgcctaggcgacagagcgagactccatcccaaaaaaaaaaaagaaaagaaagaggctgtatgtatagttctttcagactacaaggcagcaaagttcgtgcatgactcgggacttaaagtggaattaatttcaatatagcagccactttgacttccactgtgttttctgggaaaataggtttacaataggtttatttgaaggatcaaacacatgcatacactgcttggttttacagaacactttatgtggcttaaattcacatccggaactgtcttcctttacccattcatttctcccccagctctttcttttcattccctcccctacctcccatgatttaacttctcttgcaagagtaagatcatggagtgagcaggaccccatgatgttcccgatagtgttattcatcaaaaggtttgtgcaaagaagacagcagcttccttttcagatgaaatcacttttcccccctaatgttagaattggagtaaatcaaaaagccacatctcctttgtggtcagctctagtagttatataaaatcctttaccaaaagcttagaaatggagataaatcaaatcgtggattatgttagggttccatcttatcagtaggtgcagtaagagggttaaattaatgaagacgacaattttatcacattcagtggtggacagaaaaatggtaagaaaatttccatagcaataatacttaaagttatctcaggcacttcttttgttttgttttgtgtgtgtgtgtgtgtgagtgttacttttttccaagcagaaaatgtcttttcaatattcataaagttgataaatcctagtattaatctctaaaagaaacacctccaaattattatttatgccttacttgactccaaataattgtagcaaataaaaaactgacttgggatttggatttgcattcttaactcccatagttctttttttgtagaaagacatttagctttttgaagcatggttttcattggcaagataatctagtatcagttgttataagatcagggtttctcttgatgaggctgttgctgaagaggttaataaaaactggggaaccactaaagagttgaagagttggtggggtagaaagctgacgattaatgtacagatttgcatttgtcggggcctggggcctgtgtcatataagcccatccccacaattacactaacgcctataatgcgacagtgactaatggcagcggcagcaattaggagaatcagctccctctactggactagttaagataatgtattataattagtgcaatgaatattacaaaattacagtattttcttaaaggcacaggcatatgtccagacttgtatttattcctgattacctcacactagtatattagctaattaatgatttgcttttcataaaaatgttgagctagcatatttgtttagtaaagggaataattatgaacaatttctcattttgttataaaccacgagtaaaacacttttagaagttgcttcatttgctatattttatattgcctttccagattgctagtatgttagtttcagcttagaaaaatcagtcatttgactaccttgaggctaaattgaaagaattttttagggaggtacaggcataccttggaaatttcagaacaccacaataaaacaaattttgcaacaaaatgtcacacaaattttttggcttcccagtacatataaaagttatgttggccaggcacggtggctcatgcctgtaatcccagcactttgggaggccaaggcaggtggatcacaaggtcaggaggtcgagagcatcctggccaacatggtgaaatgccatctctactaaaaatacaaaaattagctgcatatggtggcatgtgcctgtagtcccagctactcgggaggctgaggcaagagaatctcttgatcccaggaggcagaggttgcagtgagccgagatcgcactccagcctgggcaacaagagcaagactctgtctcaaaaaaaaaaaaaagtttgtatttacactatactctagtctgttacatgtgcaatagcattatgtctaaaaaaaaaaaaagccatgtatatactttacttttattagtaaaatattttattactaaaaatgctaatgatcatctgagtcttcagcaagtcctaatctttttgctcgtggagaatcttgccttgatgttcactgctgcaggctaatccaggtggtggctgctgaggtttgtggtggctgtggcaatttcctaaaataagacaataatgaagtttgctgcatcgattgactcttcctttcacaaaaagatgtctctgtagcatgtgatgctgtttgatagcattttgctcacagtagaacagctttcaaaattggagtcagtcttcgcaaatctagccactgcttcatcgagtttatgtgatatcctaaatcctttgttgtcatttcaacagtgttcatagcatcttcaccaagagtagattccattgcaagaaaccactttctttgctcatccataagaggtaactcctcatccattcaagtttgatcatgagatggtagcagttcagtcatgtctttaggctccacttctaattctagttctcttgttatttccaccacatctgctgtgacatcctttactgaagtcttgaactcctcaaagtcacccatgagagttggaatcattgtcttccaaactcccgttattgctgatgttttgatctcccatggatcacagatgttcttaatggcatctggaatggtgaatcctttttagaaggtttgcagtttactttgcccagatccattagaggaatcgctatctatggcagtgaatagccctacaaaatatatttgaaatatattttgaaataataagaggctgaaataataagacttgaaagttgatccacaggctgcagaatggatgttgtgttagcaggcatgaaaacaacagtaatctccctgtacctgtccttcagagctcttgggtgactaggtgctttgttagtgagcagtaatattttgaaatgagtcttttctgagcagtaggtctcaacagtgggtttaaaatattcagtaaaccatgctgttaagagatgtgctgtcatcccagttttgttccatttatagagcatgggcacagtagatttagaataattcttaagcgccctaggacttttacaatggtcagtcttggcttcaaaaacaaagtcgccagctgcattagcccctaacaagagagtcagcttgttctttgaagctttgaaggcaggacttctctctagtgatgaaagtcctagatggcattttcttccaaataagtctgtttcatctccactgaaaatctgttatttagtgtagccaccttcatcaggagtcttatctagatcttctggataacttattgcagcttctacatcagcacttgctgcttcaccttgcacttctgtgttatggagatggcttcttcccttaaacctcatgaaatcaacctctcccaacttttttttcttctgcagcttcttcacctctctcatccttcatagaattgaagacagttgtgggccttgttcttgattaggctttggcctaagagaatgttgtggttggtttgatcttccatccagacaactaaaagttttctccgtatcagcaataaggctgttttgctttatcatttgtgtgctcactggagtagcacttttaatctccttcaagagcttttctttgcattcacaacttggctaactggcacaagaatcttggctttcaatatgccttgcccactaagcttaattatttctagcttttgctttaaagtgagagacctgtgactcttcctttcacttgaatacttaagaggccactgtagggttatttactggcccactttcaatattgttgtctctcaagggatagggagcctgggagttgagggggtggagtggccagtttggggggcagacagaacacacacaacatttattgatttagtttgctgtctttatgggcatgtttcatgacactccaaaacaattaaaatagtaacatcaaaggccactgatcacagatcaccaaacagatataataatttttaatgtttgaatatttaaataattaccaaaatgtgacacagacatgaagtgaacctgtgttcactgttggaaaaatggcaccaatagacttgttcgatgcagggttaccagaaacctttttgttttttttttttaaatactatctgtaagcactactgtacaataaagctatgtatgcctgtattttcattaagttgcagagcaaacgtggtaatatttagctttagttttacttcatctggcataagatcaactccttatataacaagatgataaaagttgtggtgtgcttctataatttcattcaagtagataaagttgaaaaataatgacttgcttttataaacagtatgaagcaatgtagtgcagtaaatgaaattttattccttctttacaatgttctcaaaattatttttatgtttaatccaaataaagagcaagaataaagcaacatttcagattttggtttctggagacaatagttagaaagcatgagttatgagtgacttaaaattcttgttgcctgtacttcactttgaaataacattatgctttaaaaagcattacactgctaaaggttaattagaattctgcagaattactatagctaaaagtaggtaacaagatatctttttttctattgtttaactcctttgtttcagaatgcctattcctgtgcattaaaagtgtccctccaaggaaattaggacatctgcagagttgaaaaacacctaagtctcagtcacttagagtcacacatcagggctcagagtgctatgactaggaaaatgctgacctcctttcattagtatgatcgtgcctttccagcttttgatagatccaagcgctatcttcccaccactcaccaaatgttccacctgtcaaagggtttcaggtccctgcagacttcggttttgacctgtggggaaagtagacttcctcgaactggggaagccacatgttgtacatccttctataaactatgattatcattcttagtaggaaaatatgtgatttctttttttttttttttttttaaagtaagcatcaaatatttgaccaaccagttgggcagagaatatactgaaactttttatataacctcatccaaatgtcccctgcatttaagaaatgaaattcttctaattgcgtttataaattgtaaattatattgcatttagaaattaaaattctttttcttaatttgttttcaaggtgttctttgcagaagatgtgggttcaaacaaaggtgcaatcattggactcatggtgggcggtgttgtcatagcgacagtgatcgtcatcaccttggtgatgctgaagaagaaacagtacacatccattcatcatggtgtggtggaggtaggtaaacttgactgcatgtttccaagtgggaattaagactatgagagaattaggcttagctttttgctaagaactagctaagtatctcttttaaaaaacgaatcagtgtgcttccatgatgcttgggttacagttgttctttcttgttttggttttcattcattgcaacttaccgtgaatattctgctcaaggtattgagagtgtgtgttgttatctcaacttacaatttgtgttgaagttatcaaaataatacaaatgataatgcatgactttaaaaaagcatgattactcttagacttttttttttcaaacacaagcaacaaaaaccagtacaagaagttaaaaataaaaatagaagtaggaagttgctttttccaaaaaaactaaacatgtttattcttggatttcttttgtcttaaatagtctggcctctcaatacaaccaggtaatagtaaataatgtgacttttcagtgcagactcttacctttaaagtttctcaggaaatcacactataccaaatggcccaccaaaacatacatgattgttatttgagagttctgcaacctattaccctgcacttccacctgaaatatcttagtttcaaggtgctatactaaaacaagaaagagagaaagaaaatttacgaataagttatttttatgcatttgaaatgccatttggatgggggaaaaagtgttaaaatctcacagtatatgcaactttttaggaaactgtcttgcagagagtatagtgtaaacataacttttatatgcacagggaaactgaaaaatttgtgtgacatttaattgcgatattttaagagttatggaatttttagagctgaaagatttattgatgatgaccaatcaaattgatcttctcatcttgtagatgagggaactgaggccgagacagaagggttcaaattatgcaaggtcaagctcagagtccagatttcccctcatattccccattgctttttttttttttttttgagacagtctcgcgctgttgcccaggctggatcttggctcactgcaacctctgcctcctgggttcaagcaattctcttgtctcagcttcctgagtagctgggactatgggcacacgccaccatgcccggctaatttttgtttttagtagagacagggtttcaccatattggtcaggctggtctcgaactcctgacctcaggtgatccacccgccttggcttcccaaagtgctgggattacaggcgtgagccaccgcgtctggcccccattgctttttccatcagagaaaagtccaggtgtttctagggagttgaagattccactatccccaaggaaatgggctctaaaccattcttgattagaagaggacaggcagagtttaaataaatgaaatttgtggtgaagccagaaatttcattttgctcagcaattaaaacctctgcagactacaacagaagctgctgatggaaattggggtggagcctcatttccccattcatactgacgtggatgagcagtgtgaggaaggaaaccaagagaacagcaggcagcagggtggaaaggaacggactgacccatagatcagagtgtgagcacataaaagcaatgaccccactgtcatgtttggccattgcaccttttgtgatagtatctaagcttatgtccctcaaaacagtgtaagataggttttcattagtatcagcttatttcatttctgctcaaattaatttttaaaaaaatttaattccatatttgagcaaataaagatgtcttcatacttgagtaattcaagaccccttttttgctgctgttgttgttttggtttttttcatggttttgttgttttcttttgttgttgttgtttctttgttttttgagatggagtcttgctctttcacccaggctggagtgcagtggcatgatctccgctcactgcaacctccacctcccaggttcaagcgattctcctacctcactctcagcctcctgagtaactgggattacaggggcataccaccacgcctggctaatttttgtatttttagtagagacagggttttgccatgttggccaggctggtcttgaattcctggcctcaagtgatccgccctccccaacctcccaaggtgctgggattacaggcatgagccaccatgcctggccttcaagagcactttttagtttatttaatataattctctttgttgccggtctgtccgttgaagttgccttctttgatgccagaggccaaagacttggcttcctcgggcttccataacaaagtaacacagatgggtggattaagcaacagaaatttaccctctcacatttctggagtgtaagatcaaggtatcagccaggttggttcctccccaggcatctctccttggtttgcagatgcctgtctgctccctgtatcttcacatgaccttcactctgtttttctgctgtgtcctaacctcttcctacaaggacaccagtcatagtggattaggatcaaccctgatgaccttgtttaactttaataacctcttcgaccctatctgcaaatacagtcacaggtggaggtactggcagcttaggacttcaacatatgaattctagggggacacgttttagcccgtaacagaccccagtgatgctgagcataaaagcaaggcctccacctggagctccttcccctggctgtgcgtgagaccaggtcctacctcagacctaaggaaaaagaatccccaaataggaggctgcgaatctgagtgttgaaaatttccccaaatgaatgagatgtgcagtcggatttgagaatccctgacacatcattttaacactccttccttttagttctccgcgcaagcctcagggagtggaaaatggtatctctcacctcccagataaccggttgccttttaagtgctcttccagctgcctgaattaaaacgctctttttttagtcagtttaccaagcagtgtctcattggacttaaaatgtcagaggagaagttgacactttgacccagattctgacattaatttttaagccaggaggtatccttgcaggagcaaaatcgggaaggatggctgttcagctcttctctcctcattttgctgtctactggagagcaactggaagcctttctagatgaggggctccacctcattcgtgtttgttttgtttatttcctctcagctccttcccctcaagacctttgtgactgtccttcctgaaagcagccctctgtgcagccccatagtgtgtctgtacagcaatgttgaaatagaccacattccgcttttctgtcctcaaaaaagatgtagtttagctgggatggtagaacctgaacacagggagttgcaacccagcctagggatgttcccaggtgagagagcacggtgggctttcagagcaccatttttcttagcattccagcgtctgcacccacagaagtgatgcttctgcaacatcctcttcctaccttaacaggcactctcaccctcaagtacatggaaatacctttatttccggctctggctaaccttcattaatcagtaaccctacttcagtaagaacaaaaatgagtacatcaatatttccagttggactcacctcagtcactcaggacagaataccattgtacttacataccatcgtgcctgaagaagtcatgatgaaagctttggtttccaggagattttttgtttttagagtgaaaaatgcccgcagaagatcacagagataggaaccctaggaaaaaaactcctgagaacaaatgtataaatgaaacaagcctagaacagtcacataccacttcacactggagagaacgttctgagaaatgtggcatggggcggtttgatcgctgtgcaaacatcataaagtacatgtacataaatctagatggtatagcctgctacacacctgggctacacacctacaactattgctcctaggctccacacctgtgcagcatattgctgcactgaatactatagacagttgtaacacactggcagggatttgcgtatctaaacaaactagaaaaggtacagtaaaaaatacggtattatggggccaccatcatatgtttggtctgtcgtggactaaaatgtcattatgtggcccataactgtatttttattggtagagttgttagcatttggaaatgagcacttgctagttgttgtttttttttttttttttttttttcaaataagcaggaaatattgacttactgaatttacttagccataaggccagagagtcactctgtgagccattggccacgctttcccaaggaggtaactgtgccttattggtgcttcaagcagtgaagcaatagccctttattattaccactccccaaatgtgccctccatgtcagaatagccctctggtggctggaaatctcagcactagctgaattaaccaccttgctcctgttttaggacgttcctgcaaagcccactaatcccaggatctgtttagtagcaagcggtacttttctacattcacatacatagacactggatatttaaaaatacgtattgtagctctttctgctactctccccagacatgtcacctttaataaggagaagttgggggcacagcttctctttattataggatgtgaaaaagttttcctctcacagatctgatcacttgaacaccagaagtctccccgcccccacctcctggttatctcattaatgatctaaataagaagagagttccttttatttggcttttatggaggtatggcatatgactttttctaagtaatatgctgtcacactggtgactgtataaaaagatgtccttagaggtcctttcttcccggccagaagctgacccaccaggatacagacgcactgacgttggcattgtagagtagttggagagagtggtcaggttgaatggaaagccacgataaggaaaagtgagggggggtgcagaacctaggagtggcttacagtgagcagcaggaagagaaattggaagatcaaaggaaagcatcaaaaatgatcacaggccaggcgtggtggctcacacctgtaatcccagcatttggggaggccaaggcaggtggatcacttgaggctaggagttcgagtccagcctggccaacatggtgagaccctgtctctaataaaaatacaaaaaattagccaggcgtggtggcatgcgcctgtagtcgcagctactcaggaggctgaggcaggagaatcgcttgaacccaggagatggaggctgcagtgagccaaaatcacgccactgcactccagcctgggtgacagagcaagactgtcttaaaaaaaaaaaaaattatgaagggatagcaaaggagttcctgaacctgcctgaagaattgcttgatgttggccataaacatagtcaactgccttctagttatatataactatagagagatggcatcaaaattaggaaaacaagcatctatacaactaggtagcaggcagttactgggaggttacgagggataagtcactagcttgaaaacttcctattttctttgcttttattttttttttccgcagacttgtggctcctttgatgtgtcacactattgttgtattgttcgccttagttcccttaccctcctttactcgtctggtccatctcaatgacaggattctgtcgtttggcctgactcagtcccttgtataaaaggacatctattaatccacatcctgctggttactgtacataataaaatgtaaacgtggtgtttcctgcctctcctccaagctcacacacccgcatgtaaatactctaggggcaataggaggagacctagaaactaaggtcacccaaatagaatcttgtccctgcaggcggatagctgagctctaaattactctggatacagtgaaggactaaatggttccaatgaatcaagttcagggagaaaagggtcagggggtatggaggttagccaaagagtgtcaaacgttctcctcaaagctattttagaacaaggctggtcaggctatttgggctcagctcttttcagcgtgtgtcataggcagcagccagttgaagccatgccaccatgcagtgcaggggtccaggtctcaggaaggtgcagcgtaccgagagtcacatgaagacctcagatcatttcctgctgctgtgtaatccaggcagtctgggaagagaatgaatattcagtggttgtatgtatgtgtgtcttcatcccagcaagtgacagatgttcctgcccagttggaaaatggaaattctgacttcattgtcttatcattccttccagaacaagcaccatgggctcaaaccctccctggctctgctttaagggaaataatattgtgtctgtgcagaggccctgtctgcacagggtcgtggtagggctggccttcacatggtggcccatgccactgctgtagcttagccatgaggaagagattggtgagcctgctggagaggaaggctacccttacttggtgctcctcctttatccatagacatgagtactcagattttcgcatctagctttcaaggggctggagattaaagatccaatccatactccttggatgcccttttgtcaagataatcccttcttctgtagctcctaagccctctaaggtctgagggccaagctgccccatggcaggaatggcaaaatgtagctgtcctctcagtggcaaaaggtaataggattatcaagtagcaaaacagaagccaagaaaagacaggagagttagaggtctggattgtgcaccagccttggagcctcgcatctctagcagggcactcttaagcgttaggctttggagtttgaagaggagataaacctatcaaattgccaggtgttcccctgcccttgatgcatgcaaatgattgttgacagccagtgtgatggtagatgtgcctcctggaagaaataaaagtataatattccaacaatcaagcagcattgtggcttttttctacaatcagaaacatagcagctttgtgcttgatctcctaagcaagataattttttttaacctgggcattctttgagttctcagtttcgaggtgatggggagcaaaaatgatgcccaagttcaaatggcgtactgctgcagataggctgtctcctggcacacagatttacagagtgaatgaaatctctcattcattggtgctaatctttaaccatggtttttaacttacaagttggaggctaattacacagttaccagttaaagccaggtgacctcatttgttgacaacagtgcacagcaaaggaaagaggagaggataaggaaaatatctgtgatttgctcccagaaggacagtgaagctgagcatccatttgagcagagtcctctgagtactggccttggtcagagcttgttggtgggagtgtgctaaggggagatgcctaggtctgtcattggagtaagctgagggtttggatgcaggggaactcaggcagctctgagccacagggtggtagatgggagggattcacagtggcgcacagtctcttccataaatggaaacgtaagaatcggggcacatggccatggcggctcatgcctgtagtcctagtgctactttaggaggccgaggtaggcggatcacctgaggtcagtttgagaccagcatggccaacatggtgaaaccccatctctactaaaaatacaaaaattagccaggcgtagtggcgggtgcctgtaatcccagctactcgggaggctgaggcaggagaatcacttgaacctgggaggcagaggttgcagtgagccgagattgcctgggcaacaagagcaagactccaactcaaaaaaaatgggcacataatggatggaacattctgtcccaagggatgagggagctgtatatctacctattccagctgccttgggattagccactggtagtcattccacctcactcccagactgaaaagagtcaatcacttcatgaagtggggctatccgaagggaccacaggggacctgattatactgacagatttatttttatttatttactttttttgagacagagtctccctctgttgcccaggccggagtgcagtggcacgatcttggctcactgcagcctcagcctcctgggttcaagcagttcttctgcctcagcctctggagtagctgggactacaggcacgtgctactgtgcctggctaaatttttttgtatttttgttaaagatggggtttcactatgttggccaggcgtgtctcaaactcccgacctcgtgatccacccgccttggcctcccaaaagggctgggattttgagccacctcacctggccttttttttcttggagatggagtctcactctgtctcccaggctggagtgcagtggcacaatcttggctcactgcaaactccaccccccaagttcaagccattctcctgcctccgcctgtggagcagctgggattacaggcgtgcaccaccacgcctggctaatttttgtatttttagtagagacaaggtttcaccatgttggccaggctggtctcaaactcctgacctcaagtgacgcacccacctcaggctcccaaagtgctgggattacaggagtgagccactgcacccggccatattgacagatcttttagtctgaattgttatcagccagtgtggtctagtcatgacatatctagctccatctcgagacctcatgtcttactgctgacactacatcctcgctggtactttttcttccttggcttcaggggcattgctgtgtaggctcagatccatgccagatggggtgtgtagggggaaaagctgcataagggaggaatgtcacttggcaacactcaacaagggggaatgggcctgcagtattctcccagagatgaatgagcagcccattctaggaaatatccctttgaaggaatatcttctctatggtacatccaaacttttctctggaaaacatgcctcttcattctgatgactttctatttattctcttcatcttaccatggttttacaaaagaggaattttaacatactcattcagcagagttaaggacctcctctcttctgcgaacggggagaggtataacaaatatagtaaaacaagaacagccactgcccacgttgtaggggtaagtaccctgcccaacctgcagacagtaaatgccacacacagctctaacagtgacagggggagaaaaacgtcttcagttactggcctgaccttagaggtaaagcaacatattaacagagagggtctgattttaaactttgagctgaacatacttctatagtatcttaattctcagtttttaaaaaattacatcatctagaatggcgtcgtccttgctcttccttttttcttgtgccaaataatagccccctttggtatatgttattgttttaattgattctcaaacctctccttaacattttaacaaacataaaatttgatagaaatgggctagactaaattcagcagtccaggaaatcgagtatttttctacacagatttgagtgtcacccaagatacagtatactttgctgaatctccctccatgatactcttgtggttttatctattttaccaaaacacttccacgtaaaacaggcttccgttgactctgtttgtcctttatggacccaacaggggaggaaaaaataccattgcactgggtttatccacttactgtggagttggggaaccagaaacaaccactggacacgttgcaagcgcgtcaaggtttccaccgccacctggtggctagatggagcacagcatctgtgtaactggtgggcaaaggcgttctgctccaagatgtcaaagtgggggagaaaattatgggtgttctgcaatcttggcaaaagaagagtactgtactccttatctttttactgcttctccatgttcacccttaaaagattgatttttattttttactcagctctcctcttgtttttcaggttgacgccgctgtcaccccagaggagcgccacctgtccaagatgcagcagaacggctacgaaaatccaacctacaagttctttgagcagatgcagaactagacccccgccacagcagcctctgaagttggacagcaaaaccattgcttcactacccatcggtgtccatttatagaataatgtgggaagaaacaaacccgttttatgatttactcattatcgccttttgacagctgtgctgtaacacaagtagatgcctgaacttgaattaatccacacatcagtaatgtattctatctctctttacattttggtctctatactacattattaatgggttttgtgtactgtaaagaatttagctgtatcaaactagtgcatgaatagattctctcctgattatttatcacatagccccttagccagttgtatattattcttgtggtttgtgacccaattaagtcctactttacatatgctttaagaatcgatgggggatgcttcatgtgaacgtgggagttcagctgcttctcttgcctaagtattcctttcctgatcactatgcattttaaagttaaacatttttaagtatttcagatgctttagagagattttttttccatgactgcattttactgtacagattgctgcttctgctatatttgtgatataggaattaagaggatacacacgtttgtttcttcgtgcctgttttatgtgcacacattaggcattgagacttcaagcttttctttttttgtccacgtatctttgggtctttgataaagaaaagaatccctgttcattgtaagcacttttacggggcgggtggggaggggtgctctgctggtcttcaattaccaagaattctccaaaacaattttctgcaggatgattgtacagaatcattgcttatgacatgatcgctttctacactgtattacataaataaattaaataaaataaccccgggcaagacttttctttgaaggatgactacagacattaaataatcgaagtaattttgggtggggagaagaggcagattcaattttctttaaccagtctgaagtttcatttatgatacaaaagaagatgaaaatggaagtggcaatataaggggatgaggaaggcatgcctggacaaacccttcttttaagatgtgtcttcaatttgtataaaatggtgttttcatgtaaataaatacattcttggaggagcaccattgtgctggtgtgaatgattccatagtaacaatcttgaccatttactgacgtacagaccagtgagaagtcttcgcatgttgggtacccacacctgttgtgtcttaattgcaagtctgagtaggaagttggggccaacatgtgtctcccagtgctgggaaaatatttcatagacctaatttacagtctttacttgatctaaaacattttgctgccatattttggccctcaagtttgtcccaaatgagagacaaagggaaaagttccagggaaataaaaattaagacagctgattatctgtaaagcatggtttctcatcctgaacgctactaacattttgcagggaataattccttgttgaagggagttgtcctgaccagtgtaggatatttatttattttatttatgttttttgagagtctcgctctgtcacccaggctggagtgcagtggcacaatctcggctcactgcactccagcctgggagacagacgagactccgtctcaataaataaataaataaataaataaataaataaaaggagggcctggcacgaatgacatgcagggaaggcagtgagcaggtggaggtccctgtactcgttgtggtgccttatctaccaggcggttgagttgacgtctttgtggacagaattcgattacaaaggtgtccgaaagtctccaggtgggggagagttttgtagcgggcataatttgggttgtaaattgactgttgtctcctgagcagtctcctggtgagggagagtttcactggagctttgaaacacatgttagacagccttgccctgtagggagtgtctcgtgaaggagaggtaaacaattataattgcatttctaaagggctaagtaggacatgggaaactggaaaatggagaaaagaagagaaaaaaatagtaactcattctctttttcttagaaaaatgaggatacttggtcacatcctcacatggtgaagaataagatggtctcttcatttcccttcaacactagtcccatcgtgaggctctgccctcatgacctaatctaatcctaactgcctcccaaaggtcccacctccacatcccattattggggattagggtttcaacatagggatttgggggaaacacaaacactcagttcatagtgatatctgactgcgattccaaaggtctgaggacacattggccctgttgtttttgctgtgttgtccttggcctcaggtgaacattttagctttagattgcaacattttaagctaaaaacactaagctagaaaattaaacttatctcgtcacattctgcatggtgaacaaactcaaaactcacctgagtgtatcttgttttcatgagaaaaaatgaccggtcatctcccttgccctgttagggacagttagacatgactgctgtatgaagatatgtacatgttaacaattcatatgtacaagctactgttccattttgcctggcccaaggggaggtagctagctagttggggtagcagggcgaattaaccctaatataatagtacatttctaatgccaccaatgaaatgaaaaccagctctcaaacatggcactatatgggatggcattccaaggccaactcagttacagtaactacagctttaactttgatcattttgttaccagaaaggggtcccaatccagaccccaagacagggttcttggatctcatgcaagaaagaattcaaggcgggtccatagaggaaaaggaaatgaagttttaaagaaagtaggaaaataaagagtggttgctccataggcagagtgaacctaagggctgctggttgcccattttattgttatttcttaattatttactaaacaagggctgaattattcatgcctccccttggtagaccatatagggtaacttcctgatgttgccatggcatttgtaaaccgtcatggctctagtgggagtgtagcagtgaggacaaccagaggtcactctcattgctatcttggttttggtgg

SEQ ID NO: 2 - protein, 770 aa, Homo sapiens
MLPGLALLLLAAWTARALEVPTDGNAGLLAEPQIAMFCGRLNMHMNVQNGKWDSDPSGTKTCIDTKEGILQYCQEVYPELQITNVVEANQPVTIQNWCKRGRKQCKTHPHFVIPYRCLVGEFVSDALLVPDKCKFLHQERMDVCETHLHWHTVAKETCSEKSTNLHDYGMLLPCGIDKFRGVEFVCCPLAEESDNVDSADAEEDDSDVWWGGADTDYADGSEDKVVEVAEEEEVAEVEEEEADDDEDDEDGDEVEEEAEEPYEEATERTTSIATTTTTTTESVEEVVREVCSEQAETGPCRAMISRWYFDVTEGKCAPFFYGGCGGNRNNFDTEEYCMAVCGSAMSQSLLKTTQEPLARDPVKLPTTAASTPDAVDKYLETPGDENEHAHFQKAKERLEAKHRERMSQVMREWEEAERQAKNLPKADKKAVIQHFQEKVESLEQEAANERQQLVETHMARVEAMLNDRRRLALENYITALQAVPPRPRHVFNMLKKYVRAEQKDRQHTLKHFEHVRMVDPKKAAQIRSQVMTHLRVIYERMNQSLSLLYNVPAVAEEIQDEVDELLQKEQNYSDDVLANMISEPRISYGNDALMPSLTETKTTVELLPVNGEFSLDDLQPWHSFGADSVPANTENEVEPVDARPAADRGLTTRPGSGLTNIKTEEISEVKMDAEFRHDSGYEVHHQKLVFFAEDVGSNKGAIIGLMVGGVVIATVIVITLVMLKKKQYTSIHHGVVEVDAAVTPEERHLSKMQQNGYENPTYKFFEQMQN

SEQ ID NO: 3 - DNA, 5133 bp, Artificial Sequence
  Fusion protein
  CDS (1)..(5133)
atgagctcagagactggcccagtggctgtggaccccacattgagacggcggatcgagccccatgagtttgaggtattcttcgatccgagagagctccgcaaggagacctgcctgctttacgaaattaattgggggggccggcactccatttggcgacatacatcacagaacactaacaagcacgtcgaagtcaacttcatcgagaagttcacgacagaaagatatttctgtccgaacacaaggtgcagcattacctggtttctcagctggagcccatgcggcgaatgtagtagggccatcactgaattcctgtcaaggtatccccacgtcactctgtttatttacatcgcaaggctgtaccaccacgctgacccccgcaatcgacaaggcctgcgggatttgatctcttcaggtgtgactatccaaattatgactgagcaggagtcaggatactgctggagaaactttgtgaattatagcccgagtaatgaagcccactggcctaggtatccccatctgtgggtacgactgtacgttcttgaactgtactgcatcatactgggcctgcctccttgtctcaacattctgagaaggaagcagccacagctgacattctttaccatcgctcttcagtcttgtcattaccagcgactgcccccacacattctctgggccaccgggttgaaaagcggcagcgagactcccgggacctcagagtccgccacacccgaaagtgataaaaagtattctattggtttagccatcggcactaattccgttggatgggctgtcataaccgatgaatacaaagtaccttcaaagaaatttaaggtgttggggaacacagaccgtcattcgattaaaaagaatcttatcggtgccctcctattcgatagtggcgaaacggcagaggcgactcgcctgaaacgaaccgctcggagaaggtatacacgtcgcaagaaccgaatatgttacttacaagaaatttttagcaatgagatggccaaagttgacgattctttctttcaccgtttggaagagtccttccttgtcgaagaggacaagaaacatgaacggcaccccatctttggaaacatagtagatgaggtggcatatcatgaaaagtacccaacgatttatcacctcagaaaaaagctagttgactcaactgataaagcggacctgaggttaatctacttggctcttgcccatatgataaagttccgtgggcactttctcattgagggtgatctaaatccggacaactcggatgtcgacaaactgttcatccagttagtacaaacctataatcagttgtttgaagagaaccctataaatgcaagtggcgtggatgcgaaggctattcttagcgcccgcctctctaaatcccgacggctagaaaacctgatcgcacaattacccggagagaagaaaaatgggttgttcggtaaccttatagcgctctcactaggcctgacaccaaattttaagtcgaacttcgacttagctgaagatgccaaattgcagcttagtaaggacacgtacgatgacgatctcgacaatctactggcacaaattggagatcagtatgcggacttatttttggctgccaaaaaccttagcgatgcaatcctcctatctgacatactgagagttaatactgagattaccaaggcgccgttatccgcttcaatgatcaaaaggtacgatgaacatcaccaagacttgacacttctcaaggccctagtccgtcagcaactgcctgagaaatataaggaaatattctttgatcagtcgaaaaacgggtacgcaggttatattgacggcggagcgagtcaagaggaattctacaagtttatcaaacccatattagagaagatggatgggacggaagagttgcttgtaaaactcaatcgcgaagatctactgcgaaagcagcggactttcgacaacggtagcattccacatcaaatccacttaggcgaattgcatgctatacttagaaggcaggaggatttttatccgttcctcaaagacaatcgtgaaaagattgagaaaatcctaacctttcgcataccttactatgtgggacccctggcccgagggaactctcggttcgcatggatgacaagaaagtccgaagaaacgattactccatggaattttgaggaagttgtcgataaaggtgcgtcagctcaatcgttcatcgagaggatgaccaactttgacaagaatttaccgaacgaaaaagtattgcctaagcacagtttactttacgagtatttcacagtgtacaatgaactcacgaaagttaagtatgtcactgagggcatgcgtaaacccgcctttctaagcggagaacagaagaaagcaatagtagatctgttattcaagaccaaccgcaaagtgacagttaagcaattgaaagaggactactttaagaaaattgaatgcttcgattctgtcgagatctccggggtagaagatcgatttaatgcgtcacttggtacgtatcatgacctcctaaagataattaaagataaggacttcctggataacgaagagaatgaagatatcttagaagatatagtgttgactcttaccctctttgaagatcgggaaatgattgaggaaagactaaaaacatacgctcacctgttcgacgataaggttatgaaacagttaaagaggcgtcgctatacgggctggggacgattgtcgcggaaacttatcaacgggataagagacaagcaaagtggtaaaactattctcgattttctaaagagcgacggcttcgccaataggaactttatgcagctgatccatgatgactctttaaccttcaaagaggatatacaaaaggcacaggtttccggacaaggggactcattgcacgaacatattgcgaatcttgctggttcgccagccatcaaaaagggcatactccagacagtcaaagtagtggatgagctagttaaggtcatgggacgtcacaaaccggaaaacattgtaatcgagatggcacgcgaaaatcaaacgactcagaaggggcaaaaaaacagtcgagagcggatgaagagaatagaagagggtattaaagaactgggcagccagatcttaaaggagcatcctgtggaaaatacccaattgcagaacgagaaactttacctctattacctacaaaatggaagggacatgtatgttgatcaggaactggacataaaccgtttatctgattacgacgtcgatcacattgtaccccaatcctttttgaaggacgattcaatcgacaataaagtgcttacacgctcggataagaaccgagggaaaagtgacaatgttccaagcgaggaagtcgtaaagaaaatgaagaactattggcggcagctcctaaatgcgaaactgataacgcaaagaaagttcgataacttaactaaagctgagaggggtggcttgtctgaacttgacaaggccggatttattaaacgtcagctcgtggaaacccgccaaatcacaaagcatgttgcacagatactagattcccgaatgaatacgaaatacgacgagaacgataagctgattcgggaagtcaaagtaatcactttaaagtcaaaattggtgtcggacttcagaaaggattttcaattctataaagttagggagataaataactaccaccatgcgcacgacgcttatcttaatgccgtcgtagggaccgcactcattaagaaatacccgaagctagaaagtgagtttgtgtatggtgattacaaagtttatgacgtccgtaagatgatcgcgaaaagcgaacaggagataggcaaggctacagccaaatacttcttttattctaacattatgaatttctttaagacggaaatcactctggcaaacggagagatacgcaaacgacctttaattgaaaccaatggggagacaggtgaaatcgtatgggataagggccgggacttcgcgacggtgagaaaagttttgtccatgccccaagtcaacatagtaaagaaaactgaggtgcagaccggagggttttcaaaggaatcgattcttccaaaaaggaatagtgataagctcatcgctcgtaaaaaggactgggacccgaaaaagtacggtggcttcgtgagccctacagttgcctattctgtcctagtagtggcaaaagttgagaagggaaaatccaagaaactgaagtcagtcaaagaattattggggataacgattatggagcgctcgtcttttgaaaagaaccccatcgacttccttgaggcgaaaggttacaaggaagtaaaaaaggatctcataattaaactaccaaagtatagtctgtttgagttagaaaatggccgaaaacggatgttggctagcgccggagagcttcaaaaggggaacgaactcgcactaccgtctaaatacgtgaatttcctgtatttagcgtcccattacgagaagttgaaaggttcacctgaagataacgaacagaagcaactttttgttgagcagcacaaacattatctcgacgaaatcatagagcaaatttcggaattcagtaagagagtcatcctagctgatgccaatctggacaaagtattaagcgcatacaacaagcacagggataaacccatacgtgagcaggcggaaaatattatccatttgtttactcttaccaacctcggcgctccagccgcattcaagtattttgacacaacgatagatcgcaaacagtacagatctaccaaggaggtgctagacgcgacactgattcaccaatccatcacgggattatatgaaactcggatagatttgtcacagcttgggggtgactctggtggttctactaatctgtcagatattattgaaaaggagaccggtaagcaactggttatccaggaatccatcctcatgctcccagaggaggtggaagaagtcattgggaacaagccggaaagcgatatactcgtgcacaccgcctacgacgagagcaccgacgagaatgtcatgcttctgactagcgacgcccctgaatacaagccttgggctctggtcatacaggatagcaacggtgagaacaagattaagatgctctctggtggttctcccaagaagaagaggaaagtctaa

SEQ ID NO: 4 - protein, 1710 aa, Artificial Sequence
  Synthetic Construct
MSSETGPVAVDPTLRRRIEPHEFEVFFDPRELRKETCLLYEINWGGRHSIWRHTSQNTNKHVEVNFIEKFTTERYFCPNTRCSITWFLSWSPCGECSRAITEFLSRYPHVTLFIYIARLYHHADPRNRQGLRDLISSGVTIQIMTEQESGYCWRNFVNYSPSNEAHWPRYPHLWVRLYVLELYCIILGLPPCLNILRRKQPQLTFFTIALQSCHYQRLPPHILWATGLKSGSETPGTSESATPESDKKYSIGLAIGTNSVGWAVITDEYKVPSKKFKVLGNTDRHSIKKNLIGALLFDSGETAEATRLKRTARRRYTRRKNRICYLQEIFSNEMAKVDDSFFHRLEESFLVEEDKKHERHPIFGNIVDEVAYHEKYPTIYHLRKKLVDSTDKADLRLIYLALAHMIKFRGHFLIEGDLNPDNSDVDKLFIQLVQTYNQLFEENPINASGVDAKAILSARLSKSRRLENLIAQLPGEKKNGLFGNLIALSLGLTPNFKSNFDLAEDAKLQLSKDTYDDDLDNLLAQIGDQYADLFLAAKNLSDAILLSDILRVNTEITKAPLSASMIKRYDEHHQDLTLLKALVRQQLPEKYKEIFFDQSKNGYAGYIDGGASQEEFYKFIKPILEKMDGTEELLVKLNREDLLRKQRTFDNGSIPHQIHLGELHAILRRQEDFYPFLKDNREKIEKILTFRIPYYVGPLARGNSRFAWMTRKSEETITPWNFEEVVDKGASAQSFIERMTNFDKNLPNEKVLPKHSLLYEYFTVYNELTKVKYVTEGMRKPAFLSGEQKKAIVDLLFKTNRKVTVKQLKEDYFKKIECFDSVEISGVEDRFNASLGTYHDLLKIIKDKDFLDNEENEDILEDIVLTLTLFEDREMIEERLKTYAHLFDDKVMKQLKRRRYTGWGRLSRKLINGIRDKQSGKTILDFLKSDGFANRNFMQLIHDDSLTFKEDIQKAQVSGQGDSLHEHIANLAGSPAIKKGILQTVKVVDELVKVMGRHKPENIVIEMARENQTTQKGQKNSRERMKRIEEGIKELGSQILKEHPVENTQLQNEKLYLYYLQNGRDMYVDQELDINRLSDYDVDHIVPQSFLKDDSIDNKVLTRSDKNRGKSDNVPSEEVVKKMKNYWRQLLNAKLITQRKFDNLTKAERGGLSELDKAGFIKRQLVETRQITKHVAQILDSRMNTKYDENDKLIREVKVITLKSKLVSDFRKDFQFYKVREINNYHHAHDAYLNAVVGTALIKKYPKLESEFVYGDYKVYDVRKMIAKSEQEIGKATAKYFFYSNIMNFFKTEITLANGEIRKRPLIETNGETGEIVWDKGRDFATVRKVLSMPQVNIVKKTEVQTGGFSKESILPKRNSDKLIARKKDWDPKKYGGFVSPTVAYSVLVVAKVEKGKSKKLKSVKELLGITIMERSSFEKNPIDFLEAKGYKEVKKDLIIKLPKYSLFELENGRKRMLASAGELQKGNELALPSKYVNFLYLASHYEKLKGSPEDNEQKQLFVEQHKHYLDEIIEQISEFSKRVILADANLDKVLSAYNKHRDKPIREQAENIIHLFTLTNLGAPAAFKYFDTTIDRKQYRSTKEVLDATLIHQSITGLYETRIDLSQLGGDSGGSTNLSDIIEKETGKQLVIQESILMLPEEVEEVIGNKPESDILVHTAYDESTDENVMLLTSDAPEYKPWALVIQDSNGENKIKMLSGGSPKKKRKV

SEQ ID NO: 5 - DNA, 5130 bp, Artificial Sequence
  Fusion protein
  CDS (1)..(5130)
atgagctcagagactggcccagtggctgtggaccccacattgagacggcggatcgagccccatgagtttgaggtattcttcgatccgagagagctccgcaaggagacctgcctgctttacgaaattaattgggggggccggcactccatttggcgacatacatcacagaacactaacaagcacgtcgaagtcaacttcatcgagaagttcacgacagaaagatatttctgtccgaacacaaggtgcagcattacctggtttctcagctggagcccatgcggcgaatgtagtagggccatcactgaattcctgtcaaggtatccccacgtcactctgtttatttacatcgcaaggctgtaccaccacgctgaccccaatcgacaaggcctgcgggatttgatctcttcaggtgtgactatccaaattatgactgagcaggagtcaggatactgctggagaaactttgtgaattatagcccgagtaatgaagcccactggcctaggtatccccatctgtgggtacgactgtacgttcttgaactgtactgcatcatactgggcctgcctccttgtctcaacattctgagaaggaagcagccacagctgacattctttaccatcgctcttcagtcttgtcattaccagcgactgcccccacacattctctgggccaccgggttgaaaagcggcagcgagactcccgggacctcagagtccgccacacccgaaagtgataaaaagtattctattggtttagccatcggcactaattccgttggatgggctgtcataaccgatgaatacaaagtaccttcaaagaaatttaaggtgttggggaacacagaccgtcattcgattaaaaagaatcttatcggtgccctcctattcgatagtggcgaaacggcagaggcgactcgcctgaaacgaaccgctcggagaaggtatacacgtcgcaagaaccgaatatgttacttacaagaaatttttagcaatgagatggccaaagttgacgattctttctttcaccgtttggaagagtccttccttgtcgaagaggacaagaaacatgaacggcaccccatctttggaaacatagtagatgaggtggcatatcatgaaaagtacccaacgatttatcacctcagaaaaaagctagttgactcaactgataaagcggacctgaggttaatctacttggctcttgcccatatgataaagttccgtgggcactttctcattgagggtgatctaaatccggacaactcggatgtcgacaaactgttcatccagttagtacaaacctataatcagttgtttgaagagaaccctataaatgcaagtggcgtggatgcgaaggctattcttagcgcccgcctctctaaatcccgacggctagaaaacctgatcgcacaattacccggagagaagaaaaatgggttgttcggtaaccttatagcgctctcactaggcctgacaccaaattttaagtcgaacttcgacttagctgaagatgccaaattgcagcttagtaaggacacgtacgatgacgatctcgacaatctactggcacaaattggagatcagtatgcggacttatttttggctgccaaaaaccttagcgatgcaatcctcctatctgacatactgagagttaatactgagattaccaaggcgccgttatccgcttcaatgatcaaaaggtacgatgaacatcaccaagacttgacacttctcaaggccctagtccgtcagcaactgcctgagaaatataaggaaatattctttgatcagtcgaaaaacgggtacgcaggttatattgacggcggagcgagtcaagaggaattctacaagtttatcaaacccatattagagaagatggatgggacggaagagttgcttgtaaaactcaatcgcgaagatctactgcgaaagcagcggactttcgacaacggtagcattccacatcaaatccacttaggcgaattgcatgctatacttagaaggcaggaggatttttatccgttcctcaaagacaatcgtgaaaagattgagaaaatcctaacctttcgcataccttactatgtgggacccctggcccgagggaactctcggttcgcatggatgacaagaaagtccgaagaaacgattactccatggaattttgaggaagttgtcgataaaggtgcgtcagctcaatcgttcatcgagaggatgaccaactttgacaagaatttaccgaacgaaaaagtattgcctaagcacagtttactttacgagtatttcacagtgtacaatgaactcacgaaagttaagtatgtcactgagggcatgcgtaaacccgcctttctaagcggagaacagaagaaagcaatagtagatctgttattcaagaccaaccgcaaagtgacagttaagcaattgaaagaggactactttaagaaaattgaatgcttcgattctgtcgagatctccggggtagaagatcgatttaatgcgtcacttggtacgtatcatgacctcctaaagataattaaagataaggacttcctggataacgaagagaatgaagatatcttagaagatatagtgttgactcttaccctctttgaagatcgggaaatgattgaggaaagactaaaaacatacgctcacctgttcgacgataaggttatgaaacagttaaagaggcgtcgctatacgggctggggacgattgtcgcggaaacttatcaacgggataagagacaagcaaagtggtaaaactattctcgattttctaaagagcgacggcttcgccaataggaactttatgcagctgatccatgatgactctttaaccttcaaagaggatatacaaaaggcacaggtttccggacaaggggactcattgcacgaacatattgcgaatcttgctggttcgccagccatcaaaaagggcatactccagacagtcaaagtagtggatgagctagttaaggtcatgggacgtcacaaaccggaaaacattgtaatcgagatggcacgcgaaaatcaaacgactcagaaggggcaaaaaaacagtcgagagcggatgaagagaatagaagagggtattaaagaactgggcagccagatcttaaaggagcatcctgtggaaaatacccaattgcagaacgagaaactttacctctattacctacaaaatggaagggacatgtatgttgatcaggaactggacataaaccgtttatctgattacgacgtcgatcacattgtaccccaatcctttttgaaggacgattcaatcgacaataaagtgcttacacgctcggataagaaccgagggaaaagtgacaatgttccaagcgaggaagtcgtaaagaaaatgaagaactattggcggcagctcctaaatgcgaaactgataacgcaaagaaagttcgataacttaactaaagctgagaggggtggcttgtctgaacttgacaaggccggatttattaaacgtcagctcgtggaaacccgccaaatcacaaagcatgttgcacagatactagattcccgaatgaatacgaaatacgacgagaacgataagctgattcgggaagtcaaagtaatcactttaaagtcaaaattggtgtcggacttcagaaaggattttcaattctataaagttagggagataaataactaccaccatgcgcacgacgcttatcttaatgccgtcgtagggaccgcactcattaagaaatacccgaagctagaaagtgagtttgtgtatggtgattacaaagtttatgacgtccgtaagatgatcgcgaaaagcgaacaggagataggcaaggctacagccaaatacttcttttattctaacattatgaatttctttaagacggaaatcactctggcaaacggagagatacgcaaacgacctttaattgaaaccaatggggagacaggtgaaatcgtatgggataagggccgggacttcgcgacggtgagaaaagttttgtccatgccccaagtcaacatagtaaagaaaactgaggtgcagaccggagggttttcaaaggaatcgattcttccaaaaaggaatagtgataagctcatcgctcgtaaaaaggactgggacccgaaaaagtacggtggcttcgagagccctacagttgcctattctgtcctagtagtggcaaaagttgagaagggaaaatccaagaaactgaagtcagtcaaagaattattggggataacgattatggagcgctcgtcttttgaaaagaaccccatcgacttccttgaggcgaaaggttacaaggaagtaaaaaaggatctcataattaaactaccaaagtatagtctgtttgagttagaaaatggccgaaaacggatgttggctagcgccggagagcttcaaaaggggaacgaactcgcactaccgtctaaatacgtgaatttcctgtatttagcgtcccattacgagaagttgaaaggttcacctgaagataacgaacagaagcaactttttgttgagcagcacaaacattatctcgacgaaatcatagagcaaatttcggaattcagtaagagagtcatcctagctgatgccaatctggacaaagtattaagcgcatacaacaagcacagggataaacccatacgtgagcaggcggaaaatattatccatttgtttactcttaccaacctcggcgctccagccgcattcaagtattttgacacaacgatagatcgcaaacagtacagatctaccaaggaggtgctagacgcgacactgattcaccaatccatcacgggattatatgaaactcggatagatttgtcacagcttgggggtgactctggtggttctactaatctgtcagatattattgaaaaggagaccggtaagcaactggttatccaggaatccatcctcatgctcccagaggaggtggaagaagtcattgggaacaagccggaaagcgatatactcgtgcacaccgcctacgacgagagcaccgacgagaatgtcatgcttctgactagcgacgcccctgaatacaagccttgggctctggtcatacaggatagcaacggtgagaacaagattaagatgctctctggtggttctcccaagaagaagaggaaagtctaa

SEQ ID NO: 6 - protein, 1709 aa, Artificial Sequence
  Synthetic Construct
MSSETGPVAVDPTLRRRIEPHEFEVFFDPRELRKETCLLYEINWGGRHSIWRHTSQNTNKHVEVNFIEKFTTERYFCPNTRCSITWFLSWSPCGECSRAITEFLSRYPHVTLFIYIARLYHHADPNRQGLRDLISSGVTIQIMTEQESGYCWRNFVNYSPSNEAHWPRYPHLWVRLYVLELYCIILGLPPCLNILRRKQPQLTFFTIALQSCHYQRLPPHILWATGLKSGSETPGTSESATPESDKKYSIGLAIGTNSVGWAVITDEYKVPSKKFKVLGNTDRHSIKKNLIGALLFDSGETAEATRLKRTARRRYTRRKNRICYLQEIFSNEMAKVDDSFFHRLEESFLVEEDKKHERHPIFGNIVDEVAYHEKYPTIYHLRKKLVDSTDKADLRLIYLALAHMIKFRGHFLIEGDLNPDNSDVDKLFIQLVQTYNQLFEENPINASGVDAKAILSARLSKSRRLENLIAQLPGEKKNGLFGNLIALSLGLTPNFKSNFDLAEDAKLQLSKDTYDDDLDNLLAQIGDQYADLFLAAKNLSDAILLSDILRVNTEITKAPLSASMIKRYDEHHQDLTLLKALVRQQLPEKYKEIFFDQSKNGYAGYIDGGASQEEFYKFIKPILEKMDGTEELLVKLNREDLLRKQRTFDNGSIPHQIHLGELHAILRRQEDFYPFLKDNREKIEKILTFRIPYYVGPLARGNSRFAWMTRKSEETITPWNFEEVVDKGASAQSFIERMTNFDKNLPNEKVLPKHSLLYEYFTVYNELTKVKYVTEGMRKPAFLSGEQKKAIVDLLFKTNRKVTVKQLKEDYFKKIECFDSVEISGVEDRFNASLGTYHDLLKIIKDKDFLDNEENEDILEDIVLTLTLFEDREMIEERLKTYAHLFDDKVMKQLKRRRYTGWGRLSRKLINGIRDKQSGKTILDFLKSDGFANRNFMQLIHDDSLTFKEDIQKAQVSGQGDSLHEHIANLAGSPAIKKGILQTVKVVDELVKVMGRHKPENIVIEMARENQTTQKGQKNSRERMKRIEEGIKELGSQILKEHPVENTQLQNEKLYLYYLQNGRDMYVDQELDINRLSDYDVDHIVPQSFLKDDSIDNKVLTRSDKNRGKSDNVPSEEVVKKMKNYWRQLLNAKLITQRKFDNLTKAERGGLSELDKAGFIKRQLVETRQITKHVAQILDSRMNTKYDENDKLIREVKVITLKSKLVSDFRKDFQFYKVREINNYHHAHDAYLNAVVGTALIKKYPKLESEFVYGDYKVYDVRKMIAKSEQEIGKATAKYFFYSNIMNFFKTEITLANGEIRKRPLIETNGETGEIVWDKGRDFATVRKVLSMPQVNIVKKTEVQTGGFSKESILPKRNSDKLIARKKDWDPKKYGGFESPTVAYSVLVVAKVEKGKSKKLKSVKELLGITIMERSSFEKNPIDFLEAKGYKEVKKDLIIKLPKYSLFELENGRKRMLASAGELQKGNELALPSKYVNFLYLASHYEKLKGSPEDNEQKQLFVEQHKHYLDEIIEQISEFSKRVILADANLDKVLSAYNKHRDKPIREQAENIIHLFTLTNLGAPAAFKYFDTTIDRKQYRSTKEVLDATLIHQSITGLYETRIDLSQLGGDSGGSTNLSDIIEKETGKQLVIQESILMLPEEVEEVIGNKPESDILVHTAYDESTDENVMLLTSDAPEYKPWALVIQDSNGENKIKMLSGGSPKKKRKV

SEQ ID NO: 7 - DNA, 4290 bp, Artificial Sequence
  Fusion protein
  CDS (1)..(4290)
atgagctcagagactggcccagtggctgtggaccccacattgagacggcggatcgagccccatgagtttgaggtattcttcgatccgagagagctccgcaaggagacctgcctgctttacgaaattaattgggggggccggcactccatttggcgacatacatcacagaacactaacaagcacgtcgaagtcaacttcatcgagaagttcacgacagaaagatatttctgtccgaacacaaggtgcagcattacctggtttctcagctggagcccatgcggcgaatgtagtagggccatcactgaattcctgtcaaggtatccccacgtcactctgtttatttacatcgcaaggctgtaccaccacgctgacccccgcaatcgacaaggcctgcgggatttgatctcttcaggtgtgactatccaaattatgactgagcaggagtcaggatactgctggagaaactttgtgaattatagcccgagtaatgaagcccactggcctaggtatccccatctgtgggtacgactgtacgttcttgaactgtactgcatcatactgggcctgcctccttgtctcaacattctgagaaggaagcagccacagctgacattctttaccatcgctcttcagtcttgtcattaccagcgactgcccccacacattctctgggccaccgggttgaaaagcggcagcgagactcccgggacctcagagtccgccacacccgaaagtgggaaacggaactacatcctggggcttgccattgggataaccagcgttggctacggaattattgattatgagacacgcgatgtgattgacgccggggttaggctgttcaaagaggccaacgttgaaaacaacgagggaagacggagtaagcgcggagcaagaagactcaagcgcagacggagacatcggattcagagggtgaaaaagctgctcttcgattacaatctcctgaccgatcatagtgagctgagcggaatcaacccctacgaggcgcgagtgaaagggctttcccagaagctgtccgaagaggagttctccgccgcgttgctgcacctggccaaacggaggggggttcacaatgtaaacgaagtggaggaggacacgggcaatgaacttagtacgaaagaacagatcagtaggaactctaaggctctcgaagagaaatacgtcgctgagttgcagcttgagagactgaaaaaagacggcgaagtacgcggatctattaataggttcaagacttcagattacgtaaaggaagccaagcagctcctgaaagtacagaaagcgtaccatcagctcgatcagagcttcatcgatacctacatagatttgctggagacacggaggacatactacgagggcccaggggaaggatctccttttgggtggaaggacatcaaggaatggtacgagatgcttatgggacattgtacatattttccggaggagctcaggagcgtcaagtacgcctacaatgccgacctgtacaatgccctcaatgacctcaataacctcgtgattaccagggacgagaacgagaagctggagtactatgaaaagttccagattatcgagaatgtgtttaagcagaagaagaagccgacacttaagcagattgcaaaggaaatcctcgtgaatgaggaagatatcaagggatacagagtgacaagtacaggcaagcccgagttcacaaatctgaaggtgtaccacgatattaaggacataaccgcacgaaaggagataatcgaaaacgctgagctcctcgatcagatcgcaaaaattcttaccatctaccagtctagtgaggacattcaggaggaactgactaatctgaacagtgagctcacccaagaggaaattgagcagatttcaaacctgaaaggctacaccgggacgcacaatctgagcctcaaagcaatcaacctcattctggatgaactttggcacacaaatgacaaccaaattgccatattcaaccgcctgaaactggtgccaaaaaaagtggatctgtcacagcaaaaggaaatccctacaaccttggttgacgattttattctgtcccccgttgtcaagcggagcttcatccagtcaatcaaggtgatcaatgccatcattaaaaaatacggattgccaaacgatataattatcgagcttgcacgagagaagaactcaaaggacgcccagaagatgattaacgaaatgcagaagcgcaaccgccagacaaacgaacgcatagaggaaattataagaacaaccggcaaagagaatgccaagtatctgatcgagaaaatcaagctgcacgacatgcaagaaggcaagtgcctgtactctctggaagctatcccactcgaagatctgctgaataatccattcaattacgaggtggaccacatcatccctagatccgtaagctttgacaattccttcaataacaaagttctggttaaacaggaggaaaattctaaaaaagggaaccggaccccgttccagtacctgagctccagtgacagcaagattagctacgagacttttaagaaacatattctgaatctggccaaaggcaaaggcaggatcagcaagaccaagaaggagtacctcctcgaagaacgcgacattaacagatttagtgtgcagaaagatttcatcaaccgaaaccttgtcgatactcggtacgccacgagaggcctgatgaatctcctcaggagctacttccgcgtcaataatctggacgttaaagtcaagagcataaatgggggattcaccagctttctgaggagaaagtggaagtttaagaaggaacgaaacaaaggatacaagcaccatgctgaggatgctttgatcatcgctaacgcggactttatctttaaggaatggaaaaagctggataaggcaaagaaagtgatggaaaaccagatgttcgaggagaagcaggcagagtcaatgcctgagatcgagacagagcaggaatacaaggaaattttcatcacccctcatcagattaaacacataaaggacttcaaagactataaatactctcatagggtggacaaaaaacccaatcgcaagctcattaatgacaccctgtactcaacacggaaggatgataaaggtaataccttgattgtgaataatcttaatggattgtatgacaaagataacgacaagctcaagaagctgatcaacaagtctccagagaagctccttatgtatcaccacgacccacagacttatcagaaattgaaactgatcatggagcaatacggggatgagaagaacccactctacaaatattatgaggaaacaggtaattacctgaccaagtactccaagaaggataacggaccagtgatcaaaaagataaagtactatggcaacaaacttaatgcgcatttggacataactgacgattaccccaattctcgaaacaaggttgtgaagctctccctgaagccttatagatttgacgtgtacctggataatggggtttataaattcgtcaccgtgaaaaatctggacgtgatcaaaaaggagaactattatgaagtaaactcaaagtgctatgaggaggcgaagaagctgaagaagatctccaatcaggccgagttcatcgcttccttctataagaacgatctcatcaagatcaatggagagctttatcgcgtcattggtgtgaacaatgacttgctgaacaggatcgaagtcaatatgatagacattacctaccgggagtatctcgaaaacatgaatgataaacggccgcctcacatcatcaagacaatcgcatctaaaactcagtcaataaaaaagtactctaccgatatcctggggaatctctatgaagtgaagtcaaagaagcacccacaaatcattaaaaaaggtggatcccccaagaagaagaggaaagtctcgagcgactacaaagaccatgacggtgattataaagatcatgacatcgattacaaggatgacgatgacaagtctggtggttctactaatctgtcagatattattgaaaaggagaccggtaagcaactggttatccaggaatccatcctcatgctcccagaggaggtggaagaagtcattgggaacaagccggaaagcgatatactcgtgcacaccgcctacgacgagagcaccgacgagaatgtcatgcttctgactagcgacgcccctgaatacaagccttgggctctggtcatacaggatagcaacggtgagaacaagattaagatgctctctggtggttctcccaagaagaagaggaaagtctaa

SEQ ID NO: 8 - protein, 1429 aa, Artificial Sequence
  Synthetic Construct
MSSETGPVAVDPTLRRRIEPHEFEVFFDPRELRKETCLLYEINWGGRHSIWRHTSQNTNKHVEVNFIEKFTTERYFCPNTRCSITWFLSWSPCGECSRAITEFLSRYPHVTLFIYIARLYHHADPRNRQGLRDLISSGVTIQIMTEQESGYCWRNFVNYSPSNEAHWPRYPHLWVRLYVLELYCIILGLPPCLNILRRKQPQLTFFTIALQSCHYQRLPPHILWATGLKSGSETPGTSESATPESGKRNYILGLAIGITSVGYGIIDYETRDVIDAGVRLFKEANVENNEGRRSKRGARRLKRRRRHRIQRVKKLLFDYNLLTDHSELSGINPYEARVKGLSQKLSEEEFSAALLHLAKRRGVHNVNEVEEDTGNELSTKEQISRNSKALEEKYVAELQLERLKKDGEVRGSINRFKTSDYVKEAKQLLKVQKAYHQLDQSFIDTYIDLLETRRTYYEGPGEGSPFGWKDIKEWYEMLMGHCTYFPEELRSVKYAYNADLYNALNDLNNLVITRDENEKLEYYEKFQIIENVFKQKKKPTLKQIAKEILVNEEDIKGYRVTSTGKPEFTNLKVYHDIKDITARKEIIENAELLDQIAKILTIYQSSEDIQEELTNLNSELTQEEIEQISNLKGYTGTHNLSLKAINLILDELWHTNDNQIAIFNRLKLVPKKVDLSQQKEIPTTLVDDFILSPVVKRSFIQSIKVINAIIKKYGLPNDIIIELAREKNSKDAQKMINEMQKRNRQTNERIEEIIRTTGKENAKYLIEKIKLHDMQEGKCLYSLEAIPLEDLLNNPFNYEVDHIIPRSVSFDNSFNNKVLVKQEENSKKGNRTPFQYLSSSDSKISYETFKKHILNLAKGKGRISKTKKEYLLEERDINRFSVQKDFINRNLVDTRYATRGLMNLLRSYFRVNNLDVKVKSINGGFTSFLRRKWKFKKERNKGYKHHAEDALIIANADFIFKEWKKLDKAKKVMENQMFEEKQAESMPEIETEQEYKEIFITPHQIKHIKDFKDYKYSHRVDKKPNRKLINDTLYSTRKDDKGNTLIVNNLNGLYDKDNDKLKKLINKSPEKLLMYHHDPQTYQKLKLIMEQYGDEKNPLYKYYEETGNYLTKYSKKDNGPVIKKIKYYGNKLNAHLDITDDYPNSRNKVVKLSLKPYRFDVYLDNGVYKFVTVKNLDVIKKENYYEVNSKCYEEAKKLKKISNQAEFIASFYKNDLIKINGELYRVIGVNNDLLNRIEVNMIDITYREYLENMNDKRPPHIIKTIASKTQSIKKYSTDILGNLYEVKSKKHPQIIKKGGSPKKKRKVSSDYKDHDGDYKDHDIDYKDDDDKSGGSTNLSDIIEKETGKQLVIQESILMLPEEVEEVIGNKPESDILVHTAYDESTDENVMLLTSDAPEYKPWALVIQDSNGENKIKMLSGGSPKKKRKV

SEQ ID NO: 9 - DNA, 5133 bp, Artificial Sequence
  Fusion protein
  CDS (1)..(5133)
atgagctcagagactggcccagtggctgtggaccccacattgagacggcggatcgagccccatgagtttgaggtattcttcgatccgagagagctccgcaaggagacctgcctgctttacgaaattaattgggggggccggcactccatttggcgacatacatcacagaacactaacaagcacgtcgaagtcaacttcatcgagaagttcacgacagaaagatatttctgtccgaacacaaggtgcagcattacctggtttctcagctatagcccatgcggcgaatgtagtagggccatcactgaattcctgtcaaggtatccccacgtcactctgtttatttacatcgcaaggctgtaccaccacgctgaccccgagaatcgacaaggcctgcgggatttgatctcttcaggtgtgactatccaaattatgactgagcaggagtcaggatactgctggagaaactttgtgaattatagcccgagtaatgaagcccactggcctaggtatccccatctgtgggtacgactgtacgttcttgaactgtactgcatcatactgggcctgcctccttgtctcaacattctgagaaggaagcagccacagctgacattctttaccatcgctcttcagtcttgtcattaccagcgactgcccccacacattctctgggccaccgggttgaaaagcggcagcgagactcccgggacctcagagtccgccacacccgaaagtgataaaaagtattctattggtttagccatcggcactaattccgttggatgggctgtcataaccgatgaatacaaagtaccttcaaagaaatttaaggtgttggggaacacagaccgtcattcgattaaaaagaatcttatcggtgccctcctattcgatagtggcgaaacggcagaggcgactcgcctgaaacgaaccgctcggagaaggtatacacgtcgcaagaaccgaatatgttacttacaagaaatttttagcaatgagatggccaaagttgacgattctttctttcaccgtttggaagagtccttccttgtcgaagaggacaagaaacatgaacggcaccccatctttggaaacatagtagatgaggtggcatatcatgaaaagtacccaacgatttatcacctcagaaaaaagctagttgactcaactgataaagcggacctgaggttaatctacttggctcttgcccatatgataaagttccgtgggcactttctcattgagggtgatctaaatccggacaactcggatgtcgacaaactgttcatccagttagtacaaacctataatcagttgtttgaagagaaccctataaatgcaagtggcgtggatgcgaaggctattcttagcgcccgcctctctaaatcccgacggctagaaaacctgatcgcacaattacccggagagaagaaaaatgggttgttcggtaaccttatagcgctctcactaggcctgacaccaaattttaagtcgaacttcgacttagctgaagatgccaaattgcagcttagtaaggacacgtacgatgacgatctcgacaatctactggcacaaattggagatcagtatgcggacttatttttggctgccaaaaaccttagcgatgcaatcctcctatctgacatactgagagttaatactgagattaccaaggcgccgttatccgcttcaatgatcaaaaggtacgatgaacatcaccaagacttgacacttctcaaggccctagtccgtcagcaactgcctgagaaatataaggaaatattctttgatcagtcgaaaaacgggtacgcaggttatattgacggcggagcgagtcaagaggaattctacaagtttatcaaacccatattagagaagatggatgggacggaagagttgcttgtaaaactcaatcgcgaagatctactgcgaaagcagcggactttcgacaacggtagcattccacatcaaatccacttaggcgaattgcatgctatacttagaaggcaggaggatttttatccgttcctcaaagacaatcgtgaaaagattgagaaaatcctaacctttcgcataccttactatgtgggacccctggcccgagggaactctcggttcgcatggatgacaagaaagtccgaagaaacgattactccatggaattttgaggaagttgtcgataaaggtgcgtcagctcaatcgttcatcgagaggatgaccaactttgacaagaatttaccgaacgaaaaagtattgcctaagcacagtttactttacgagtatttcacagtgtacaatgaactcacgaaagttaagtatgtcactgagggcatgcgtaaacccgcctttctaagcggagaacagaagaaagcaatagtagatctgttattcaagaccaaccgcaaagtgacagttaagcaattgaaagaggactactttaagaaaattgaatgcttcgattctgtcgagatctccggggtagaagatcgatttaatgcgtcacttggtacgtatcatgacctcctaaagataattaaagataaggacttcctggataacgaagagaatgaagatatcttagaagatatagtgttgactcttaccctctttgaagatcgggaaatgattgaggaaagactaaaaacatacgctcacctgttcgacgataaggttatgaaacagttaaagaggcgtcgctatacgggctggggacgattgtcgcggaaacttatcaacgggataagagacaagcaaagtggtaaaactattctcgattttctaaagagcgacggcttcgccaataggaactttatgcagctgatccatgatgactctttaaccttcaaagaggatatacaaaaggcacaggtttccggacaaggggactcattgcacgaacatattgcgaatcttgctggttcgccagccatcaaaaagggcatactccagacagtcaaagtagtggatgagctagttaaggtcatgggacgtcacaaaccggaaaacattgtaatcgagatggcacgcgaaaatcaaacgactcagaaggggcaaaaaaacagtcgagagcggatgaagagaatagaagagggtattaaagaactgggcagccagatcttaaaggagcatcctgtggaaaatacccaattgcagaacgagaaactttacctctattacctacaaaatggaagggacatgtatgttgatcaggaactggacataaaccgtttatctgattacgacgtcgatcacattgtaccccaatcctttttgaaggacgattcaatcgacaataaagtgcttacacgctcggataagaaccgagggaaaagtgacaatgttccaagcgaggaagtcgtaaagaaaatgaagaactattggcggcagctcctaaatgcgaaactgataacgcaaagaaagttcgataacttaactaaagctgagaggggtggcttgtctgaacttgacaaggccggatttattaaacgtcagctcgtggaaacccgccaaatcacaaagcatgttgcacagatactagattcccgaatgaatacgaaatacgacgagaacgataagctgattcgggaagtcaaagtaatcactttaaagtcaaaattggtgtcggacttcagaaaggattttcaattctataaagttagggagataaataactaccaccatgcgcacgacgcttatcttaatgccgtcgtagggaccgcactcattaagaaatacccgaagctagaaagtgagtttgtgtatggtgattacaaagtttatgacgtccgtaagatgatcgcgaaaagcgaacaggagataggcaaggctacagccaaatacttcttttattctaacattatgaatttctttaagacggaaatcactctggcaaacggagagatacgcaaacgacctttaattgaaaccaatggggagacaggtgaaatcgtatgggataagggccgggacttcgcgacggtgagaaaagttttgtccatgccccaagtcaacatagtaaagaaaactgaggtgcagaccggagggttttcaaaggaatcgattcttccaaaaaggaatagtgataagctcatcgctcgtaaaaaggactgggacccgaaaaagtacggtggcttcgatagccctacagttgcctattctgtcctagtagtggcaaaagttgagaagggaaaatccaagaaactgaagtcagtcaaagaattattggggataacgattatggagcgctcgtcttttgaaaagaaccccatcgacttccttgaggcgaaaggttacaaggaagtaaaaaaggatctcataattaaactaccaaagtatagtctgtttgagttagaaaatggccgaaaacggatgttggctagcgccggagagcttcaaaaggggaacgaactcgcactaccgtctaaatacgtgaatttcctgtatttagcgtcccattacgagaagttgaaaggttcacctgaagataacgaacagaagcaactttttgttgagcagcacaaacattatctcgacgaaatcatagagcaaatttcggaattcagtaagagagtcatcctagctgatgccaatctggacaaagtattaagcgcatacaacaagcacagggataaacccatacgtgagcaggcggaaaatattatccatttgtttactcttaccaacctcggcgctccagccgcattcaagtattttgacacaacgatagatcgcaaacgatacacttctaccaaggaggtgctagacgcgacactgattcaccaatccatcacgggattatatgaaactcggatagatttgtcacagcttgggggtgactctggtggttctactaatctgtcagatattattgaaaaggagaccggtaagcaactggttatccaggaatccatcctcatgctcccagaggaggtggaagaagtcattgggaacaagccggaaagcgatatactcgtgcacaccgcctacgacgagagcaccgacgagaatgtcatgcttctgactagcgacgcccctgaatacaagccttgggctctggtcatacaggatagcaacggtgagaacaagattaagatgctctctggtggttctcccaagaagaagaggaaagtctaa

SEQ ID NO: 10 - protein, 1710 aa, Artificial Sequence
  Synthetic Construct
MSSETGPVAVDPTLRRRIEPHEFEVFFDPRELRKETCLLYEINWGGRHSIWRHTSQNTNKHVEVNFIEKFTTERYFCPNTRCSITWFLSYSPCGECSRAITEFLSRYPHVTLFIYIARLYHHADPENRQGLRDLISSGVTIQIMTEQESGYCWRNFVNYSPSNEAHWPRYPHLWVRLYVLELYCIILGLPPCLNILRRKQPQLTFFTIALQSCHYQRLPPHILWATGLKSGSETPGTSESATPESDKKYSIGLAIGTNSVGWAVITDEYKVPSKKFKVLGNTDRHSIKKNLIGALLFDSGETAEATRLKRTARRRYTRRKNRICYLQEIFSNEMAKVDDSFFHRLEESFLVEEDKKHERHPIFGNIVDEVAYHEKYPTIYHLRKKLVDSTDKADLRLIYLALAHMIKFRGHFLIEGDLNPDNSDVDKLFIQLVQTYNQLFEENPINASGVDAKAILSARLSKSRRLENLIAQLPGEKKNGLFGNLIALSLGLTPNFKSNFDLAEDAKLQLSKDTYDDDLDNLLAQIGDQYADLFLAAKNLSDAILLSDILRVNTEITKAPLSASMIKRYDEHHQDLTLLKALVRQQLPEKYKEIFFDQSKNGYAGYIDGGASQEEFYKFIKPILEKMDGTEELLVKLNREDLLRKQRTFDNGSIPHQIHLGELHAILRRQEDFYPFLKDNREKIEKILTFRIPYYVGPLARGNSRFAWMTRKSEETITPWNFEEVVDKGASAQSFIERMTNFDKNLPNEKVLPKHSLLYEYFTVYNELTKVKYVTEGMRKPAFLSGEQKKAIVDLLFKTNRKVTVKQLKEDYFKKIECFDSVEISGVEDRFNASLGTYHDLLKIIKDKDFLDNEENEDILEDIVLTLTLFEDREMIEERLKTYAHLFDDKVMKQLKRRRYTGWGRLSRKLINGIRDKQSGKTILDFLKSDGFANRNFMQLIHDDSLTFKEDIQKAQVSGQGDSLHEHIANLAGSPAIKKGILQTVKVVDELVKVMGRHKPENIVIEMARENQTTQKGQKNSRERMKRIEEGIKELGSQILKEHPVENTQLQNEKLYLYYLQNGRDMYVDQELDINRLSDYDVDHIVPQSFLKDDSIDNKVLTRSDKNRGKSDNVPSEEVVKKMKNYWRQLLNAKLITQRKFDNLTKAERGGLSELDKAGFIKRQLVETRQITKHVAQILDSRMNTKYDENDKLIREVKVITLKSKLVSDFRKDFQFYKVREINNYHHAHDAYLNAVVGTALIKKYPKLESEFVYGDYKVYDVRKMIAKSEQEIGKATAKYFFYSNIMNFFKTEITLANGEIRKRPLIETNGETGEIVWDKGRDFATVRKVLSMPQVNIVKKTEVQTGGFSKESILPKRNSDKLIARKKDWDPKKYGGFDSPTVAYSVLVVAKVEKGKSKKLKSVKELLGITIMERSSFEKNPIDFLEAKGYKEVKKDLIIKLPKYSLFELENGRKRMLASAGELQKGNELALPSKYVNFLYLASHYEKLKGSPEDNEQKQLFVEQHKHYLDEIIEQISEFSKRVILADANLDKVLSAYNKHRDKPIREQAENIIHLFTLTNLGAPAAFKYFDTTIDRKRYTSTKEVLDATLIHQSITGLYETRIDLSQLGGDSGGSTNLSDIIEKETGKQLVIQESILMLPEEVEEVIGNKPESDILVHTAYDESTDENVMLLTSDAPEYKPWALVIQDSNGENKIKMLSGGSPKKKRKV

SEQ ID NO: 11 - DNA, 5133 bp, Artificial Sequence
  Fusion protein
  CDS (1)..(5133)
atgagctcagagactggcccagtggctgtggaccccacattgagacggcggatcgagccccatgagtttgaggtattcttcgatccgagagagctccgcaaggagacctgcctgctttacgaaattaattgggggggccggcactccatttggcgacatacatcacagaacactaacaagcacgtcgaagtcaacttcatcgagaagttcacgacagaaagatatttctgtccgaacacaaggtgcagcattacctggtttctcagctatagcccatgcggcgaatgtagtagggccatcactgaattcctgtcaaggtatccccacgtcactctgtttatttacatcgcaaggctgtaccaccacgctgaccccgagaatcgacaaggcctgcgggatttgatctcttcaggtgtgactatccaaattatgactgagcaggagtcaggatactgctggagaaactttgtgaattatagcccgagtaatgaagcccactggcctaggtatccccatctgtgggtacgactgtacgttcttgaactgtactgcatcatactgggcctgcctccttgtctcaacattctgagaaggaagcagccacagctgacattctttaccatcgctcttcagtcttgtcattaccagcgactgcccccacacattctctgggccaccgggttgaaaagcggcagcgagactcccgggacctcagagtccgccacacccgaaagtgataaaaagtattctattggtttagccatcggcactaattccgttggatgggctgtcataaccgatgaatacaaagtaccttcaaagaaatttaaggtgttggggaacacagaccgtcattcgattaaaaagaatcttatcggtgccctcctattcgatagtggcgaaacggcagaggcgactcgcctgaaacgaaccgctcggagaaggtatacacgtcgcaagaaccgaatatgttacttacaagaaatttttagcaatgagatggccaaagttgacgattctttctttcaccgtttggaagagtccttccttgtcgaagaggacaagaaacatgaacggcaccccatctttggaaacatagtagatgaggtggcatatcatgaaaagtacccaacgatttatcacctcagaaaaaagctagttgactcaactgataaagcggacctgaggttaatctacttggctcttgcccatatgataaagttccgtgggcactttctcattgagggtgatctaaatccggacaactcggatgtcgacaaactgttcatccagttagtacaaacctataatcagttgtttgaagagaaccctataaatgcaagtggcgtggatgcgaaggctattcttagcgcccgcctctctaaatcccgacggctagaaaacctgatcgcacaattacccggagagaagaaaaatgggttgttcggtaaccttatagcgctctcactaggcctgacaccaaattttaagtcgaacttcgacttagctgaagatgccaaattgcagcttagtaaggacacgtacgatgacgatctcgacaatctactggcacaaattggagatcagtatgcggacttatttttggctgccaaaaaccttagcgatgcaatcctcctatctgacatactgagagttaatactgagattaccaaggcgccgttatccgcttcaatgatcaaaaggtacgatgaacatcaccaagacttgacacttctcaaggccctagtccgtcagcaactgcctgagaaatataaggaaatattctttgatcagtcgaaaaacgggtacgcaggttatattgacggcggagcgagtcaagaggaattctacaagtttatcaaacccatattagagaagatggatgggacggaagagttgcttgtaaaactcaatcgcgaagatctactgcgaaagcagcggactttcgacaacggtagcattccacatcaaatccacttaggcgaattgcatgctatacttagaaggcaggaggatttttatccgttcctcaaagacaatcgtgaaaagattgagaaaatcctaacctttcgcataccttactatgtgggacccctggcccgagggaactctcggttcgcatggatgacaagaaagtccgaagaaacgattactccatggaattttgaggaagttgtcgataaaggtgcgtcagctcaatcgttcatcgagaggatgaccaactttgacaagaatttaccgaacgaaaaagtattgcctaagcacagtttactttacgagtatttcacagtgtacaatgaactcacgaaagttaagtatgtcactgagggcatgcgtaaacccgcctttctaagcggagaacagaagaaagcaatagtagatctgttattcaagaccaaccgcaaagtgacagttaagcaattgaaagaggactactttaagaaaattgaatgcttcgattctgtcgagatctccggggtagaagatcgatttaatgcgtcacttggtacgtatcatgacctcctaaagataattaaagataaggacttcctggataacgaagagaatgaagatatcttagaagatatagtgttgactcttaccctctttgaagatcgggaaatgattgaggaaagactaaaaacatacgctcacctgttcgacgataaggttatgaaacagttaaagaggcgtcgctatacgggctggggacgattgtcgcggaaacttatcaacgggataagagacaagcaaagtggtaaaactattctcgattttctaaagagcgacggcttcgccaataggaactttatgcagctgatccatgatgactctttaaccttcaaagaggatatacaaaaggcacaggtttccggacaaggggactcattgcacgaacatattgcgaatcttgctggttcgccagccatcaaaaagggcatactccagacagtcaaagtagtggatgagctagttaaggtcatgggacgtcacaaaccggaaaacattgtaatcgagatggcacgcgaaaatcaaacgactcagaaggggcaaaaaaacagtcgagagcggatgaagagaatagaagagggtattaaagaactgggcagccagatcttaaaggagcatcctgtggaaaatacccaattgcagaacgagaaactttacctctattacctacaaaatggaagggacatgtatgttgatcaggaactggacataaaccgtttatctgattacgacgtcgatcacattgtaccccaatcctttttgaaggacgattcaatcgacaataaagtgcttacacgctcggataagaaccgagggaaaagtgacaatgttccaagcgaggaagtcgtaaagaaaatgaagaactattggcggcagctcctaaatgcgaaactgataacgcaaagaaagttcgataacttaactaaagctgagaggggtggcttgtctgaacttgacaaggccggatttattaaacgtcagctcgtggaaacccgccaaatcacaaagcatgttgcacagatactagattcccgaatgaatacgaaatacgacgagaacgataagctgattcgggaagtcaaagtaatcactttaaagtcaaaattggtgtcggacttcagaaaggattttcaattctataaagttagggagataaataactaccaccatgcgcacgacgcttatcttaatgccgtcgtagggaccgcactcattaagaaatacccgaagctagaaagtgagtttgtgtatggtgattacaaagtttatgacgtccgtaagatgatcgcgaaaagcgaacaggagataggcaaggctacagccaaatacttcttttattctaacattatgaatttctttaagacggaaatcactctggcaaacggagagatacgcaaacgacctttaattgaaaccaatggggagacaggtgaaatcgtatgggataagggccgggacttcgcgacggtgagaaaagttttgtccatgccccaagtcaacatagtaaagaaaactgaggtgcagaccggagggttttcaaaggaatcgattcttccaaaaaggaatagtgataagctcatcgctcgtaaaaaggactgggacccgaaaaagtacggtggcttcgtgagccctacagttgcctattctgtcctagtagtggcaaaagttgagaagggaaaatccaagaaactgaagtcagtcaaagaattattggggataacgattatggagcgctcgtcttttgaaaagaaccccatcgacttccttgaggcgaaaggttacaaggaagtaaaaaaggatctcataattaaactaccaaagtatagtctgtttgagttagaaaatggccgaaaacggatgttggctagcgccggagagcttcaaaaggggaacgaactcgcactaccgtctaaatacgtgaatttcctgtatttagcgtcccattacgagaagttgaaaggttcacctgaagataacgaacagaagcaactttttgttgagcagcacaaacattatctcgacgaaatcatagagcaaatttcggaattcagtaagagagtcatcctagctgatgccaatctggacaaagtattaagcgcatacaacaagcacagggataaacccatacgtgagcaggcggaaaatattatccatttgtttactcttaccaacctcggcgctccagccgcattcaagtattttgacacaacgatagatcgcaaacagtacagatctaccaaggaggtgctagacgcgacactgattcaccaatccatcacgggattatatgaaactcggatagatttgtcacagcttgggggtgactctggtggttctactaatctgtcagatattattgaaaaggagaccggtaagcaactggttatccaggaatccatcctcatgctcccagaggaggtggaagaagtcattgggaacaagccggaaagcgatatactcgtgcacaccgcctacgacgagagcaccgacgagaatgtcatgcttctgactagcgacgcccctgaatacaagccttgggctctggtcatacaggatagcaacggtgagaacaagattaagatgctctctggtggttctcccaagaagaagaggaaagtctaa

SEQ ID NO: 12 - protein, 1710 aa, Artificial Sequence
  Synthetic Construct
MSSETGPVAVDPTLRRRIEPHEFEVFFDPRELRKETCLLYEINWGGRHSIWRHTSQNTNKHVEVNFIEKFTTERYFCPNTRCSITWFLSYSPCGECSRAITEFLSRYPHVTLFIYIARLYHHADPENRQGLRDLISSGVTIQIMTEQESGYCWRNFVNYSPSNEAHWPRYPHLWVRLYVLELYCIILGLPPCLNILRRKQPQLTFFTIALQSCHYQRLPPHILWATGLKSGSETPGTSESATPESDKKYSIGLAIGTNSVGWAVITDEYKVPSKKFKVLGNTDRHSIKKNLIGALLFDSGETAEATRLKRTARRRYTRRKNRICYLQEIFSNEMAKVDDSFFHRLEESFLVEEDKKHERHPIFGNIVDEVAYHEKYPTIYHLRKKLVDSTDKADLRLIYLALAHMIKFRGHFLIEGDLNPDNSDVDKLFIQLVQTYNQLFEENPINASGVDAKAILSARLSKSRRLENLIAQLPGEKKNGLFGNLIALSLGLTPNFKSNFDLAEDAKLQLSKDTYDDDLDNLLAQIGDQYADLFLAAKNLSDAILLSDILRVNTEITKAPLSASMIKRYDEHHQDLTLLKALVRQQLPEKYKEIFFDQSKNGYAGYIDGGASQEEFYKFIKPILEKMDGTEELLVKLNREDLLRKQRTFDNGSIPHQIHLGELHAILRRQEDFYPFLKDNREKIEKILTFRIPYYVGPLARGNSRFAWMTRKSEETITPWNFEEVVDKGASAQSFIERMTNFDKNLPNEKVLPKHSLLYEYFTVYNELTKVKYVTEGMRKPAFLSGEQKKAIVDLLFKTNRKVTVKQLKEDYFKKIECFDSVEISGVEDRFNASLGTYHDLLKIIKDKDFLDNEENEDILEDIVLTLTLFEDREMIEERLKTYAHLFDDKVMKQLKRRRYTGWGRLSRKLINGIRDKQSGKTILDFLKSDGFANRNFMQLIHDDSLTFKEDIQKAQVSGQGDSLHEHIANLAGSPAIKKGILQTVKVVDELVKVMGRHKPENIVIEMARENQTTQKGQKNSRERMKRIEEGIKELGSQILKEHPVENTQLQNEKLYLYYLQNGRDMYVDQELDINRLSDYDVDHIVPQSFLKDDSIDNKVLTRSDKNRGKSDNVPSEEVVKKMKNYWRQLLNAKLITQRKFDNLTKAERGGLSELDKAGFIKRQLVETRQITKHVAQILDSRMNTKYDENDKLIREVKVITLKSKLVSDFRKDFQFYKVREINNYHHAHDAYLNAVVGTALIKKYPKLESEFVYGDYKVYDVRKMIAKSEQEIGKATAKYFFYSNIMNFFKTEITLANGEIRKRPLIETNGETGEIVWDKGRDFATVRKVLSMPQVNIVKKTEVQTGGFSKESILPKRNSDKLIARKKDWDPKKYGGFVSPTVAYSVLVVAKVEKGKSKKLKSVKELLGITIMERSSFEKNPIDFLEAKGYKEVKKDLIIKLPKYSLFELENGRKRMLASAGELQKGNELALPSKYVNFLYLASHYEKLKGSPEDNEQKQLFVEQHKHYLDEIIEQISEFSKRVILADANLDKVLSAYNKHRDKPIREQAENIIHLFTLTNLGAPAAFKYFDTTIDRKQYRSTKEVLDATLIHQSITGLYETRIDLSQLGGDSGGSTNLSDIIEKETGKQLVIQESILMLPEEVEEVIGNKPESDILVHTAYDESTDENVMLLTSDAPEYKPWALVIQDSNGENKIKMLSGGSPKKKRKV

SEQ ID NO: 13 - DNA, 5133 bp, Artificial Sequence
  Fusion protein
  CDS (1)..(5133)
atgagctcagagactggcccagtggctgtggaccccacattgagacggcggatcgagccccatgagtttgaggtattcttcgatccgagagagctccgcaaggagacctgcctgctttacgaaattaattgggggggccggcactccatttggcgacatacatcacagaacactaacaagcacgtcgaagtcaacttcatcgagaagttcacgacagaaagatatttctgtccgaacacaaggtgcagcattacctggtttctcagctatagcccatgcggcgaatgtagtagggccatcactgaattcctgtcaaggtatccccacgtcactctgtttatttacatcgcaaggctgtaccaccacgctgaccccgagaatcgacaaggcctgcgggatttgatctcttcaggtgtgactatccaaattatgactgagcaggagtcaggatactgctggagaaactttgtgaattatagcccgagtaatgaagcccactggcctaggtatccccatctgtgggtacgactgtacgttcttgaactgtactgcatcatactgggcctgcctccttgtctcaacattctgagaaggaagcagccacagctgacattctttaccatcgctcttcagtcttgtcattaccagcgactgcccccacacattctctgggccaccgggttgaaaagcggcagcgagactcccgggacctcagagtccgccacacccgaaagtgataaaaagtattctattggtttagccatcggcactaattccgttggatgggctgtcataaccgatgaatacaaagtaccttcaaagaaatttaaggtgttggggaacacagaccgtcattcgattaaaaagaatcttatcggtgccctcctattcgatagtggcgaaacggcagaggcgactcgcctgaaacgaaccgctcggagaaggtatacacgtcgcaagaaccgaatatgttacttacaagaaatttttagcaatgagatggccaaagttgacgattctttctttcaccgtttggaagagtccttccttgtcgaagaggacaagaaacatgaacggcaccccatctttggaaacatagtagatgaggtggcatatcatgaaaagtacccaacgatttatcacctcagaaaaaagctagttgactcaactgataaagcggacctgaggttaatctacttggctcttgcccatatgataaagttccgtgggcactttctcattgagggtgatctaaatccggacaactcggatgtcgacaaactgttcatccagttagtacaaacctataatcagttgtttgaagagaaccctataaatgcaagtggcgtggatgcgaaggctattcttagcgcccgcctctctaaatcccgacggctagaaaacctgatcgcacaattacccggagagaagaaaaatgggttgttcggtaaccttatagcgctctcactaggcctgacaccaaattttaagtcgaacttcgacttagctgaagatgccaaattgcagcttagtaaggacacgtacgatgacgatctcgacaatctactggcacaaattggagatcagtatgcggacttatttttggctgccaaaaaccttagcgatgcaatcctcctatctgacatactgagagttaatactgagattaccaaggcgccgttatccgcttcaatgatcaaaaggtacgatgaacatcaccaagacttgacacttctcaaggccctagtccgtcagcaactgcctgagaaatataaggaaatattctttgatcagtcgaaaaacgggtacgcaggttatattgacggcggagcgagtcaagaggaattctacaagtttatcaaacccatattagagaagatggatgggacggaagagttgcttgtaaaactcaatcgcgaagatctactgcgaaagcagcggactttcgacaacggtagcattccacatcaaatccacttaggcgaattgcatgctatacttagaaggcaggaggatttttatccgttcctcaaagacaatcgtgaaaagattgagaaaatcctaacctttcgcataccttactatgtgggacccctggcccgagggaactctcggttcgcatggatgacaagaaagtccgaagaaacgattactccatggaattttgaggaagttgtcgataaaggtgcgtcagctcaatcgttcatcgagaggatgaccaactttgacaagaatttaccgaacgaaaaagtattgcctaagcacagtttactttacgagtatttcacagtgtacaatgaactcacgaaagttaagtatgtcactgagggcatgcgtaaacccgcctttctaagcggagaacagaagaaagcaatagtagatctgttattcaagaccaaccgcaaagtgacagttaagcaattgaaagaggactactttaagaaaattgaatgcttcgattctgtcgagatctccggggtagaagatcgatttaatgcgtcacttggtacgtatcatgacctcctaaagataattaaagataaggacttcctggataacgaagagaatgaagatatcttagaagatatagtgttgactcttaccctctttgaagatcgggaaatgattgaggaaagactaaaaacatacgctcacctgttcgacgataaggttatgaaacagttaaagaggcgtcgctatacgggctggggacgattgtcgcggaaacttatcaacgggataagagacaagcaaagtggtaaaactattctcgattttctaaagagcgacggcttcgccaataggaactttatgcagctgatccatgatgactctttaaccttcaaagaggatatacaaaaggcacaggtttccggacaaggggactcattgcacgaacatattgcgaatcttgctggttcgccagccatcaaaaagggcatactccagacagtcaaagtagtggatgagctagttaaggtcatgggacgtcacaaaccggaaaacattgtaatcgagatggcacgcgaaaatcaaacgactcagaaggggcaaaaaaacagtcgagagcggatgaagagaatagaagagggtattaaagaactgggcagccagatcttaaaggagcatcctgtggaaaatacccaattgcagaacgagaaactttacctctattacctacaaaatggaagggacatgtatgttgatcaggaactggacataaaccgtttatctgattacgacgtcgatcacattgtaccccaatcctttttgaaggacgattcaatcgacaataaagtgcttacacgctcggataagaaccgagggaaaagtgacaatgttccaagcgaggaagtcgtaaagaaaatgaagaactattggcggcagctcctaaatgcgaaactgataacgcaaagaaagttcgataacttaactaaagctgagaggggtggcttgtctgaacttgacaaggccggatttattaaacgtcagctcgtggaaacccgccaaatcacaaagcatgttgcacagatactagattcccgaatgaatacgaaatacgacgagaacgataagctgattcgggaagtcaaagtaatcactttaaagtcaaaattggtgtcggacttcagaaaggattttcaattctataaagttagggagataaataactaccaccatgcgcacgacgcttatcttaatgccgtcgtagggaccgcactcattaagaaatacccgaagctagaaagtgagtttgtgtatggtgattacaaagtttatgacgtccgtaagatgatcgcgaaaagcgaacaggagataggcaaggctacagccaaatacttcttttattctaacattatgaatttctttaagacggaaatcactctggcaaacggagagatacgcaaacgacctttaattgaaaccaatggggagacaggtgaaatcgtatgggataagggccgggacttcgcgacggtgagaaaagttttgtccatgccccaagtcaacatagtaaagaaaactgaggtgcagaccggagggttttcaaaggaatcgattcttccaaaaaggaatagtgataagctcatcgctcgtaaaaaggactgggacccgaaaaagtacggtggcttcgagagccctacagttgcctattctgtcctagtagtggcaaaagttgagaagggaaaatccaagaaactgaagtcagtcaaagaattattggggataacgattatggagcgctcgtcttttgaaaagaaccccatcgacttccttgaggcgaaaggttacaaggaagtaaaaaaggatctcataattaaactaccaaagtatagtctgtttgagttagaaaatggccgaaaacggatgttggctagcgccggagagcttcaaaaggggaacgaactcgcactaccgtctaaatacgtgaatttcctgtatttagcgtcccattacgagaagttgaaaggttcacctgaagataacgaacagaagcaactttttgttgagcagcacaaacattatctcgacgaaatcatagagcaaatttcggaattcagtaagagagtcatcctagctgatgccaatctggacaaagtattaagcgcatacaacaagcacagggataaacccatacgtgagcaggcggaaaatattatccatttgtttactcttaccaacctcggcgctccagccgcattcaagtattttgacacaacgatagatcgcaaacagtacagatctaccaaggaggtgctagacgcgacactgattcaccaatccatcacgggattatatgaaactcggatagatttgtcacagcttgggggtgactctggtggttctactaatctgtcagatattattgaaaaggagaccggtaagcaactggttatccaggaatccatcctcatgctcccagaggaggtggaagaagtcattgggaacaagccggaaagcgatatactcgtgcacaccgcctacgacgagagcaccgacgagaatgtcatgcttctgactagcgacgcccctgaatacaagccttgggctctggtcatacaggatagcaacggtgagaacaagattaagatgctctctggtggttctcccaagaagaagaggaaagtctaa

SEQ ID NO: 14 - protein, 1710 aa, Artificial Sequence
  Synthetic Construct
MSSETGPVAVDPTLRRRIEPHEFEVFFDPRELRKETCLLYEINWGGRHSIWRHTSQNTNKHVEVNFIEKFTTERYFCPNTRCSITWFLSYSPCGECSRAITEFLSRYPHVTLFIYIARLYHHADPENRQGLRDLISSGVTIQIMTEQESGYCWRNFVNYSPSNEAHWPRYPHLWVRLYVLELYCIILGLPPCLNILRRKQPQLTFFTIALQSCHYQRLPPHILWATGLKSGSETPGTSESATPESDKKYSIGLAIGTNSVGWAVITDEYKVPSKKFKVLGNTDRHSIKKNLIGALLFDSGETAEATRLKRTARRRYTRRKNRICYLQEIFSNEMAKVDDSFFHRLEESFLVEEDKKHERHPIFGNIVDEVAYHEKYPTIYHLRKKLVDSTDKADLRLIYLALAHMIKFRGHFLIEGDLNPDNSDVDKLFIQLVQTYNQLFEENPINASGVDAKAILSARLSKSRRLENLIAQLPGEKKNGLFGNLIALSLGLTPNFKSNFDLAEDAKLQLSKDTYDDDLDNLLAQIGDQYADLFLAAKNLSDAILLSDILRVNTEITKAPLSASMIKRYDEHHQDLTLLKALVRQQLPEKYKEIFFDQSKNGYAGYIDGGASQEEFYKFIKPILEKMDGTEELLVKLNREDLLRKQRTFDNGSIPHQIHLGELHAILRRQEDFYPFLKDNREKIEKILTFRIPYYVGPLARGNSRFAWMTRKSEETITPWNFEEVVDKGASAQSFIERMTNFDKNLPNEKVLPKHSLLYEYFTVYNELTKVKYVTEGMRKPAFLSGEQKKAIVDLLFKTNRKVTVKQLKEDYFKKIECFDSVEISGVEDRFNASLGTYHDLLKIIKDKDFLDNEENEDILEDIVLTLTLFEDREMIEERLKTYAHLFDDKVMKQLKRRRYTGWGRLSRKLINGIRDKQSGKTILDFLKSDGFANRNFMQLIHDDSLTFKEDIQKAQVSGQGDSLHEHIANLAGSPAIKKGILQTVKVVDELVKVMGRHKPENIVIEMARENQTTQKGQKNSRERMKRIEEGIKELGSQILKEHPVENTQLQNEKLYLYYLQNGRDMYVDQELDINRLSDYDVDHIVPQSFLKDDSIDNKVLTRSDKNRGKSDNVPSEEVVKKMKNYWRQLLNAKLITQRKFDNLTKAERGGLSELDKAGFIKRQLVETRQITKHVAQILDSRMNTKYDENDKLIREVKVITLKSKLVSDFRKDFQFYKVREINNYHHAHDAYLNAVVGTALIKKYPKLESEFVYGDYKVYDVRKMIAKSEQEIGKATAKYFFYSNIMNFFKTEITLANGEIRKRPLIETNGETGEIVWDKGRDFATVRKVLSMPQVNIVKKTEVQTGGFSKESILPKRNSDKLIARKKDWDPKKYGGFESPTVAYSVLVVAKVEKGKSKKLKSVKELLGITIMERSSFEKNPIDFLEAKGYKEVKKDLIIKLPKYSLFELENGRKRMLASAGELQKGNELALPSKYVNFLYLASHYEKLKGSPEDNEQKQLFVEQHKHYLDEIIEQISEFSKRVILADANLDKVLSAYNKHRDKPIREQAENIIHLFTLTNLGAPAAFKYFDTTIDRKQYRSTKEVLDATLIHQSITGLYETRIDLSQLGGDSGGSTNLSDIIEKETGKQLVIQESILMLPEEVEEVIGNKPESDILVHTAYDESTDENVMLLTSDAPEYKPWALVIQDSNGENKIKMLSGGSPKKKRKV

SEQ ID NO: 15 - DNA, 4290 bp, Artificial Sequence
  Fusion protein
  CDS (1)..(4290)
atgagctcagagactggcccagtggctgtggaccccacattgagacggcggatcgagccccatgagtttgaggtattcttcgatccgagagagctccgcaaggagacctgcctgctttacgaaattaattgggggggccggcactccatttggcgacatacatcacagaacactaacaagcacgtcgaagtcaacttcatcgagaagttcacgacagaaagatatttctgtccgaacacaaggtgcagcattacctggtttctcagctatagcccatgcggcgaatgtagtagggccatcactgaattcctgtcaaggtatccccacgtcactctgtttatttacatcgcaaggctgtaccaccacgctgaccccgagaatcgacaaggcctgcgggatttgatctcttcaggtgtgactatccaaattatgactgagcaggagtcaggatactgctggagaaactttgtgaattatagcccgagtaatgaagcccactggcctaggtatccccatctgtgggtacgactgtacgttcttgaactgtactgcatcatactgggcctgcctccttgtctcaacattctgagaaggaagcagccacagctgacattctttaccatcgctcttcagtcttgtcattaccagcgactgcccccacacattctctgggccaccgggttgaaaagcggcagcgagactcccgggacctcagagtccgccacacccgaaagtgggaaacggaactacatcctggggcttgccattgggataaccagcgttggctacggaattattgattatgagacacgcgatgtgattgacgccggggttaggctgttcaaagaggccaacgttgaaaacaacgagggaagacggagtaagcgcggagcaagaagactcaagcgcagacggagacatcggattcagagggtgaaaaagctgctcttcgattacaatctcctgaccgatcatagtgagctgagcggaatcaacccctacgaggcgcgagtgaaagggctttcccagaagctgtccgaagaggagttctccgccgcgttgctgcacctggccaaacggaggggggttcacaatgtaaacgaagtggaggaggacacgggcaatgaacttagtacgaaagaacagatcagtaggaactctaaggctctcgaagagaaatacgtcgctgagttgcagcttgagagactgaaaaaagacggcgaagtacgcggatctattaataggttcaagacttcagattacgtaaaggaagccaagcagctcctgaaagtacagaaagcgtaccatcagctcgatcagagcttcatcgatacctacatagatttgctggagacacggaggacatactacgagggcccaggggaaggatctccttttgggtggaaggacatcaaggaatggtacgagatgcttatgggacattgtacatattttccggaggagctcaggagcgtcaagtacgcctacaatgccgacctgtacaatgccctcaatgacctcaataacctcgtgattaccagggacgagaacgagaagctggagtactatgaaaagttccagattatcgagaatgtgtttaagcagaagaagaagccgacacttaagcagattgcaaaggaaatcctcgtgaatgaggaagatatcaagggatacagagtgacaagtacaggcaagcccgagttcacaaatctgaaggtgtaccacgatattaaggacataaccgcacgaaaggagataatcgaaaacgctgagctcctcgatcagatcgcaaaaattcttaccatctaccagtctagtgaggacattcaggaggaactgactaatctgaacagtgagctcacccaagaggaaattgagcagatttcaaacctgaaaggctacaccgggacgcacaatctgagcctcaaagcaatcaacctcattctggatgaactttggcacacaaatgacaaccaaattgccatattcaaccgcctgaaactggtgccaaaaaaagtggatctgtcacagcaaaaggaaatccctacaaccttggttgacgattttattctgtcccccgttgtcaagcggagcttcatccagtcaatcaaggtgatcaatgccatcattaaaaaatacggattgccaaacgatataattatcgagcttgcacgagagaagaactcaaaggacgcccagaagatgattaacgaaatgcagaagcgcaaccgccagacaaacgaacgcatagaggaaattataagaacaaccggcaaagagaatgccaagtatctgatcgagaaaatcaagctgcacgacatgcaagaaggcaagtgcctgtactctctggaagctatcccactcgaagatctgctgaataatccattcaattacgaggtggaccacatcatccctagatccgtaagctttgacaattccttcaataacaaagttctggttaaacaggaggaaaattctaaaaaagggaaccggaccccgttccagtacctgagctccagtgacagcaagattagctacgagacttttaagaaacatattctgaatctggccaaaggcaaaggcaggatcagcaagaccaagaaggagtacctcctcgaagaacgcgacattaacagatttagtgtgcagaaagatttcatcaaccgaaaccttgtcgatactcggtacgccacgagaggcctgatgaatctcctcaggagctacttccgcgtcaataatctggacgttaaagtcaagagcataaatgggggattcaccagctttctgaggagaaagtggaagtttaagaaggaacgaaacaaaggatacaagcaccatgctgaggatgctttgatcatcgctaacgcggactttatctttaaggaatggaaaaagctggataaggcaaagaaagtgatggaaaaccagatgttcgaggagaagcaggcagagtcaatgcctgagatcgagacagagcaggaatacaaggaaattttcatcacccctcatcagattaaacacataaaggacttcaaagactataaatactctcatagggtggacaaaaaacccaatcgcaagctcattaatgacaccctgtactcaacacggaaggatgataaaggtaataccttgattgtgaataatcttaatggattgtatgacaaagataacgacaagctcaagaagctgatcaacaagtctccagagaagctccttatgtatcaccacgacccacagacttatcagaaattgaaactgatcatggagcaatacggggatgagaagaacccactctacaaatattatgaggaaacaggtaattacctgaccaagtactccaagaaggataacggaccagtgatcaaaaagataaagtactatggcaacaaacttaatgcgcatttggacataactgacgattaccccaattctcgaaacaaggttgtgaagctctccctgaagccttatagatttgacgtgtacctggataatggggtttataaattcgtcaccgtgaaaaatctggacgtgatcaaaaaggagaactattatgaagtaaactcaaagtgctatgaggaggcgaagaagctgaagaagatctccaatcaggccgagttcatcgcttccttctataagaacgatctcatcaagatcaatggagagctttatcgcgtcattggtgtgaacaatgacttgctgaacaggatcgaagtcaatatgatagacattacctaccgggagtatctcgaaaacatgaatgataaacggccgcctcacatcatcaagacaatcgcatctaaaactcagtcaataaaaaagtactctaccgatatcctggggaatctctatgaagtgaagtcaaagaagcacccacaaatcattaaaaaaggtggatcccccaagaagaagaggaaagtctcgagcgactacaaagaccatgacggtgattataaagatcatgacatcgattacaaggatgacgatgacaagtctggtggttctactaatctgtcagatattattgaaaaggagaccggtaagcaactggttatccaggaatccatcctcatgctcccagaggaggtggaagaagtcattgggaacaagccggaaagcgatatactcgtgcacaccgcctacgacgagagcaccgacgagaatgtcatgcttctgactagcgacgcccctgaatacaagccttgggctctggtcatacaggatagcaacggtgagaacaagattaagatgctctctggtggttctcccaagaagaagaggaaagtctaa

SEQ ID NO: 16 - protein, 1429 aa, Artificial Sequence
  Synthetic Construct
MSSETGPVAVDPTLRRRIEPHEFEVFFDPRELRKETCLLYEINWGGRHSIWRHTSQNTNKHVEVNFIEKFTTERYFCPNTRCSITWFLSYSPCGECSRAITEFLSRYPHVTLFIYIARLYHHADPENRQGLRDLISSGVTIQIMTEQESGYCWRNFVNYSPSNEAHWPRYPHLWVRLYVLELYCIILGLPPCLNILRRKQPQLTFFTIALQSCHYQRLPPHILWATGLKSGSETPGTSESATPESGKRNYILGLAIGITSVGYGIIDYETRDVIDAGVRLFKEANVENNEGRRSKRGARRLKRRRRHRIQRVKKLLFDYNLLTDHSELSGINPYEARVKGLSQKLSEEEFSAALLHLAKRRGVHNVNEVEEDTGNELSTKEQISRNSKALEEKYVAELQLERLKKDGEVRGSINRFKTSDYVKEAKQLLKVQKAYHQLDQSFIDTYIDLLETRRTYYEGPGEGSPFGWKDIKEWYEMLMGHCTYFPEELRSVKYAYNADLYNALNDLNNLVITRDENEKLEYYEKFQIIENVFKQKKKPTLKQIAKEILVNEEDIKGYRVTSTGKPEFTNLKVYHDIKDITARKEIIENAELLDQIAKILTIYQSSEDIQEELTNLNSELTQEEIEQISNLKGYTGTHNLSLKAINLILDELWHTNDNQIAIFNRLKLVPKKVDLSQQKEIPTTLVDDFILSPVVKRSFIQSIKVINAIIKKYGLPNDIIIELAREKNSKDAQKMINEMQKRNRQTNERIEEIIRTTGKENAKYLIEKIKLHDMQEGKCLYSLEAIPLEDLLNNPFNYEVDHIIPRSVSFDNSFNNKVLVKQEENSKKGNRTPFQYLSSSDSKISYETFKKHILNLAKGKGRISKTKKEYLLEERDINRFSVQKDFINRNLVDTRYATRGLMNLLRSYFRVNNLDVKVKSINGGFTSFLRRKWKFKKERNKGYKHHAEDALIIANADFIFKEWKKLDKAKKVMENQMFEEKQAESMPEIETEQEYKEIFITPHQIKHIKDFKDYKYSHRVDKKPNRKLINDTLYSTRKDDKGNTLIVNNLNGLYDKDNDKLKKLINKSPEKLLMYHHDPQTYQKLKLIMEQYGDEKNPLYKYYEETGNYLTKYSKKDNGPVIKKIKYYGNKLNAHLDITDDYPNSRNKVVKLSLKPYRFDVYLDNGVYKFVTVKNLDVIKKENYYEVNSKCYEEAKKLKKISNQAEFIASFYKNDLIKINGELYRVIGVNNDLLNRIEVNMIDITYREYLENMNDKRPPHIIKTIASKTQSIKKYSTDILGNLYEVKSKKHPQIIKKGGSPKKKRKVSSDYKDHDGDYKDHDIDYKDDDDKSGGSTNLSDIIEKETGKQLVIQESILMLPEEVEEVIGNKPESDILVHTAYDESTDENVMLLTSDAPEYKPWALVIQDSNGENKIKMLSGGSPKKKRKV

SEQ ID NO: 17 - DNA, 6045 bp, Artificial Sequence
  Fusion protein
  CDS (1)..(6045)
atggctaaaccagcaaaacgtatcaagagtgccgcagcggcttatgtgccacaaaaccgcgatgcggtgattaccgatattaaacgcatcggggatttacagcgcgaagcatcacgtctggaaacggaaatgaatgatgccatcgcggaaattacggagaaatttgcggcccggattgcaccgattaaaaccgatattgaaaccctttcaaaaggcgttcagggatggtgtgaagcgaaccgcgacgaactgacgaacggcggcaaagtgaagacggcgaatcttgtcaccggtgatgtatcgtggcgggtccgtccaccatcagtaagtattcgtggtatggatgcagtgatggaaacgctggagcgtcttggcctgcaacgctttattcgcacgaagcaggaaatcaacaaggaagcgattttactggaaccgaaagcggtcgcaggcgttgccggaattacagttaaatcaggcattgaggatttttctattattccatttgaacaggaagccggtattagcggcagcgagactcccgggacctcagagtccgctacacccgaaagtagctcagagactggcccagtggctgtggaccccacattgagacggcggatcgagccccatgagtttgaggtattcttcgatccgagagagctccgcaaggagacctgcctgctttacgaaattaattgggggggccggcactccatttggcgacatacatcacagaacactaacaagcacgtcgaagtcaacttcatcgagaagttcacgacagaaagatatttctgtccgaacacaaggtgcagcattacctggtttctcagctggagcccatgcggcgaatgtagtagggccatcactgaattcctgtcaaggtatccccacgtcactctgtttatttacatcgcaaggctgtaccaccacgctgacccccgcaatcgacaaggcctgcgggatttgatctcttcaggtgtgactatccaaattatgactgagcaggagtcaggatactgctggagaaactttgtgaattatagcccgagtaatgaagcccactggcctaggtatccccatctgtgggtacgactgtacgttcttgaactgtactgcatcatactgggcctgcctccttgtctcaacattctgagaaggaagcagccacagctgacattctttaccatcgctcttcagtcttgtcattaccagcgactgcccccacacattctctgggccaccgggttgaaatctggtggttcttctggtggttctagcggcagcgagactcccgggacctcagagtccgccacacccgaaagttctggtggttcttctggtggttctgataaaaagtattctattggtttagccatcggcactaattccgttggatgggctgtcataaccgatgaatacaaagtaccttcaaagaaatttaaggtgttggggaacacagaccgtcattcgattaaaaagaatcttatcggtgccctcctattcgatagtggcgaaacggcagaggcgactcgcctgaaacgaaccgctcggagaaggtatacacgtcgcaagaaccgaatatgttacttacaagaaatttttagcaatgagatggccaaagttgacgattctttctttcaccgtttggaagagtccttccttgtcgaagaggacaagaaacatgaacggcaccccatctttggaaacatagtagatgaggtggcatatcatgaaaagtacccaacgatttatcacctcagaaaaaagctagttgactcaactgataaagcggacctgaggttaatctacttggctcttgcccatatgataaagttccgtgggcactttctcattgagggtgatctaaatccggacaactcggatgtcgacaaactgttcatccagttagtacaaacctataatcagttgtttgaagagaaccctataaatgcaagtggcgtggatgcgaaggctattcttagcgcccgcctctctaaatcccgacggctagaaaacctgatcgcacaattacccggagagaagaaaaatgggttgttcggtaaccttatagcgctctcactaggcctgacaccaaattttaagtcgaacttcgacttagctgaagatgccaaattgcagcttagtaaggacacgtacgatgacgatctcgacaatctactggcacaaattggagatcagtatgcggacttatttttggctgccaaaaaccttagcgatgcaatcctcctatctgacatactgagagttaatactgagattaccaaggcgccgttatccgcttcaatgatcaaaaggtacgatgaacatcaccaagacttgacacttctcaaggccctagtccgtcagcaactgcctgagaaatataaggaaatattctttgatcagtcgaaaaacgggtacgcaggttatattgacggcggagcgagtcaagaggaattctacaagtttatcaaacccatattagagaagatggatgggacggaagagttgcttgtaaaactcaatcgcgaagatctactgcgaaagcagcggactttcgacaacggtagcattccacatcaaatccacttaggcgaattgcatgctatacttagaaggcaggaggatttttatccgttcctcaaagacaatcgtgaaaagattgagaaaatcctaacctttcgcataccttactatgtgggacccctggcccgagggaactctcggttcgcatggatgacaagaaagtccgaagaaacgattactccatggaattttgaggaagttgtcgataaaggtgcgtcagctcaatcgttcatcgagaggatgaccaactttgacaagaatttaccgaacgaaaaagtattgcctaagcacagtttactttacgagtatttcacagtgtacaatgaactcacgaaagttaagtatgtcactgagggcatgcgtaaacccgcctttctaagcggagaacagaagaaagcaatagtagatctgttattcaagaccaaccgcaaagtgacagttaagcaattgaaagaggactactttaagaaaattgaatgcttcgattctgtcgagatctccggggtagaagatcgatttaatgcgtcacttggtacgtatcatgacctcctaaagataattaaagataaggacttcctggataacgaagagaatgaagatatcttagaagatatagtgttgactcttaccctctttgaagatcgggaaatgattgaggaaagactaaaaacatacgctcacctgttcgacgataaggttatgaaacagttaaagaggcgtcgctatacgggctggggacgattgtcgcggaaacttatcaacgggataagagacaagcaaagtggtaaaactattctcgattttctaaagagcgacggcttcgccaataggaactttatgcagctgatccatgatgactctttaaccttcaaagaggatatacaaaaggcacaggtttccggacaaggggactcattgcacgaacatattgcgaatcttgctggttcgccagccatcaaaaagggcatactccagacagtcaaagtagtggatgagctagttaaggtcatgggacgtcacaaaccggaaaacattgtaatcgagatggcacgcgaaaatcaaacgactcagaaggggcaaaaaaacagtcgagagcggatgaagagaatagaagagggtattaaagaactgggcagccagatcttaaaggagcatcctgtggaaaatacccaattgcagaacgagaaactttacctctattacctacaaaatggaagggacatgtatgttgatcaggaactggacataaaccgtttatctgattacgacgtcgatcacattgtaccccaatcctttttgaaggacgattcaatcgacaataaagtgcttacacgctcggataagaaccgagggaaaagtgacaatgttccaagcgaggaagtcgtaaagaaaatgaagaactattggcggcagctcctaaatgcgaaactgataacgcaaagaaagttcgataacttaactaaagctgagaggggtggcttgtctgaacttgacaaggccggatttattaaacgtcagctcgtggaaacccgccaaatcacaaagcatgttgcacagatactagattcccgaatgaatacgaaatacgacgagaacgataagctgattcgggaagtcaaagtaatcactttaaagtcaaaattggtgtcggacttcagaaaggattttcaattctataaagttagggagataaataactaccaccatgcgcacgacgcttatcttaatgccgtcgtagggaccgcactcattaagaaatacccgaagctagaaagtgagtttgtgtatggtgattacaaagtttatgacgtccgtaagatgatcgcgaaaagcgaacaggagataggcaaggctacagccaaatacttcttttattctaacattatgaatttctttaagacggaaatcactctggcaaacggagagatacgcaaacgacctttaattgaaaccaatggggagacaggtgaaatcgtatgggataagggccgggacttcgcgacggtgagaaaagttttgtccatgccccaagtcaacatagtaaagaaaactgaggtgcagaccggagggttttcaaaggaatcgattcttccaaaaaggaatagtgataagctcatcgctcgtaaaaaggactgggacccgaaaaagtacggtggcttcgtgagccctacagttgcctattctgtcctagtagtggcaaaagttgagaagggaaaatccaagaaactgaagtcagtcaaagaattattggggataacgattatggagcgctcgtcttttgaaaagaaccccatcgacttccttgaggcgaaaggttacaaggaagtaaaaaaggatctcataattaaactaccaaagtatagtctgtttgagttagaaaatggccgaaaacggatgttggctagcgccggagagcttcaaaaggggaacgaactcgcactaccgtctaaatacgtgaatttcctgtatttagcgtcccattacgagaagttgaaaggttcacctgaagataacgaacagaagcaactttttgttgagcagcacaaacattatctcgacgaaatcatagagcaaatttcggaattcagtaagagagtcatcctagctgatgccaatctggacaaagtattaagcgcatacaacaagcacagggataaacccatacgtgagcaggcggaaaatattatccatttgtttactcttaccaacctcggcgctccagccgcattcaagtattttgacacaacgatagatcgcaaacagtacagatctaccaaggaggtgctagacgcgacactgattcaccaatccatcacgggattatatgaaactcggatagatttgtcacagcttgggggtgactctggtggttctggaggatctggtggttctactaatctgtcagatattattgaaaaggagaccggtaagcaactggttatccaggaatccatcctcatgctcccagaggaggtggaagaagtcattgggaacaagccggaaagcgatatactcgtgcacaccgcctacgacgagagcaccgacgagaatgtcatgcttctgactagcgacgcccctgaatacaagccttgggctctggtcatacaggatagcaacggtgagaacaagattaagatgctctctggtggttctggaggatctggtggttctactaatctgtcagatattattgaaaaggagaccggtaagcaactggttatccaggaatccatcctcatgctcccagaggaggtggaagaagtcattgggaacaagccggaaagcgatatactcgtgcacaccgcctacgacgagagcaccgacgagaatgtcatgcttctgactagcgacgcccctgaatacaagccttgggctctggtcatacaggatagcaacggtgagaacaagattaagatgctctctggtggttctcccaagaagaagaggaaagtctaa

SEQ ID NO: 18 - protein, 2014 aa, Artificial Sequence
  Synthetic Construct
MAKPAKRIKSAAAAYVPQNRDAVITDIKRIGDLQREASRLETEMNDAIAEITEKFAARIAPIKTDIETLSKGVQGWCEANRDELTNGGKVKTANLVTGDVSWRVRPPSVSIRGMDAVMETLERLGLQRFIRTKQEINKEAILLEPKAVAGVAGITVKSGIEDFSIIPFEQEAGISGSETPGTSESATPESSSETGPVAVDPTLRRRIEPHEFEVFFDPRELRKETCLLYEINWGGRHSIWRHTSQNTNKHVEVNFIEKFTTERYFCPNTRCSITWFLSWSPCGECSRAITEFLSRYPHVTLFIYIARLYHHADPRNRQGLRDLISSGVTIQIMTEQESGYCWRNFVNYSPSNEAHWPRYPHLWVRLYVLELYCIILGLPPCLNILRRKQPQLTFFTIALQSCHYQRLPPHILWATGLKSGGSSGGSSGSETPGTSESATPESSGGSSGGSDKKYSIGLAIGTNSVGWAVITDEYKVPSKKFKVLGNTDRHSIKKNLIGALLFDSGETAEATRLKRTARRRYTRRKNRICYLQEIFSNEMAKVDDSFFHRLEESFLVEEDKKHERHPIFGNIVDEVAYHEKYPTIYHLRKKLVDSTDKADLRLIYLALAHMIKFRGHFLIEGDLNPDNSDVDKLFIQLVQTYNQLFEENPINASGVDAKAILSARLSKSRRLENLIAQLPGEKKNGLFGNLIALSLGLTPNFKSNFDLAEDAKLQLSKDTYDDDLDNLLAQIGDQYADLFLAAKNLSDAILLSDILRVNTEITKAPLSASMIKRYDEHHQDLTLLKALVRQQLPEKYKEIFFDQSKNGYAGYIDGGASQEEFYKFIKPILEKMDGTEELLVKLNREDLLRKQRTFDNGSIPHQIHLGELHAILRRQEDFYPFLKDNREKIEKILTFRIPYYVGPLARGNSRFAWMTRKSEETITPWNFEEVVDKGASAQSFIERMTNFDKNLPNEKVLPKHSLLYEYFTVYNELTKVKYVTEGMRKPAFLSGEQKKAIVDLLFKTNRKVTVKQLKEDYFKKIECFDSVEISGVEDRFNASLGTYHDLLKIIKDKDFLDNEENEDILEDIVLTLTLFEDREMIEERLKTYAHLFDDKVMKQLKRRRYTGWGRLSRKLINGIRDKQSGKTILDFLKSDGFANRNFMQLIHDDSLTFKEDIQKAQVSGQGDSLHEHIANLAGSPAIKKGILQTVKVVDELVKVMGRHKPENIVIEMARENQTTQKGQKNSRERMKRIEEGIKELGSQILKEHPVENTQLQNEKLYLYYLQNGRDMYVDQELDINRLSDYDVDHIVPQSFLKDDSIDNKVLTRSDKNRGKSDNVPSEEVVKKMKNYWRQLLNAKLITQRKFDNLTKAERGGLSELDKAGFIKRQLVETRQITKHVAQILDSRMNTKYDENDKLIREVKVITLKSKLVSDFRKDFQFYKVREINNYHHAHDAYLNAVVGTALIKKYPKLESEFVYGDYKVYDVRKMIAKSEQEIGKATAKYFFYSNIMNFFKTEITLANGEIRKRPLIETNGETGEIVWDKGRDFATVRKVLSMPQVNIVKKTEVQTGGFSKESILPKRNSDKLIARKKDWDPKKYGGFVSPTVAYSVLVVAKVEKGKSKKLKSVKELLGITIMERSSFEKNPIDFLEAKGYKEVKKDLIIKLPKYSLFELENGRKRMLASAGELQKGNELALPSKYVNFLYLASHYEKLKGSPEDNEQKQLFVEQHKHYLDEIIEQISEFSKRVILADANLDKVLSAYNKHRDKPIREQAENIIHLFTLTNLGAPAAFKYFDTTIDRKQYRSTKEVLDATLIHQSITGLYETRIDLSQLGGDSGGSGGSGGSTNLSDIIEKETGKQLVIQESILMLPEEVEEVIGNKPESDILVHTAYDESTDENVMLLTSDAPEYKPWALVIQDSNGENKIKMLSGGSGGSGGSTNLSDIIEKETGKQLVIQESILMLPEEVEEVIGNKPESDILVHTAYDESTDENVMLLTSDAPEYKPWALVIQDSNGENKIKMLSGGSPKKKRKV

SEQ ID NO: 19 - DNA, 6045 bp, Artificial Sequence
  Fusion protein
  CDS (1)..(6045)
atggctaaaccagcaaaacgtatcaagagtgccgcagcggcttatgtgccacaaaaccgcgatgcggtgattaccgatattaaacgcatcggggatttacagcgcgaagcatcacgtctggaaacggaaatgaatgatgccatcgcggaaattacggagaaatttgcggcccggattgcaccgattaaaaccgatattgaaaccctttcaaaaggcgttcagggatggtgtgaagcgaaccgcgacgaactgacgaacggcggcaaagtgaagacggcgaatcttgtcaccggtgatgtatcgtggcgggtccgtccaccatcagtaagtattcgtggtatggatgcagtgatggaaacgctggagcgtcttggcctgcaacgctttattcgcacgaagcaggaaatcaacaaggaagcgattttactggaaccgaaagcggtcgcaggcgttgccggaattacagttaaatcaggcattgaggatttttctattattccatttgaacaggaagccggtattagcggcagcgagactcccgggacctcagagtccgctacacccgaaagtagctcagagactggcccagtggctgtggaccccacattgagacggcggatcgagccccatgagtttgaggtattcttcgatccgagagagctccgcaaggagacctgcctgctttacgaaattaattgggggggccggcactccatttggcgacatacatcacagaacactaacaagcacgtcgaagtcaacttcatcgagaagttcacgacagaaagatatttctgtccgaacacaaggtgcagcattacctggtttctcagctggagcccatgcggcgaatgtagtagggccatcactgaattcctgtcaaggtatccccacgtcactctgtttatttacatcgcaaggctgtaccaccacgctgacccccgcaatcgacaaggcctgcgggatttgatctcttcaggtgtgactatccaaattatgactgagcaggagtcaggatactgctggagaaactttgtgaattatagcccgagtaatgaagcccactggcctaggtatccccatctgtgggtacgactgtacgttcttgaactgtactgcatcatactgggcctgcctccttgtctcaacattctgagaaggaagcagccacagctgacattctttaccatcgctcttcagtcttgtcattaccagcgactgcccccacacattctctgggccaccgggttgaaatctggtggttcttctggtggttctagcggcagcgagactcccgggacctcagagtccgccacacccgaaagttctggtggttcttctggtggttctgataaaaagtattctattggtttagccatcggcactaattccgttggatgggctgtcataaccgatgaatacaaagtaccttcaaagaaatttaaggtgttggggaacacagaccgtcattcgattaaaaagaatcttatcggtgccctcctattcgatagtggcgaaacggcagaggcgactcgcctgaaacgaaccgctcggagaaggtatacacgtcgcaagaaccgaatatgttacttacaagaaatttttagcaatgagatggccaaagttgacgattctttctttcaccgtttggaagagtccttccttgtcgaagaggacaagaaacatgaacggcaccccatctttggaaacatagtagatgaggtggcatatcatgaaaagtacccaacgatttatcacctcagaaaaaagctagttgactcaactgataaagcggacctgaggttaatctacttggctcttgcccatatgataaagttccgtgggcactttctcattgagggtgatctaaatccggacaactcggatgtcgacaaactgttcatccagttagtacaaacctataatcagttgtttgaagagaaccctataaatgcaagtggcgtggatgcgaaggctattcttagcgcccgcctctctaaatcccgacggctagaaaacctgatcgcacaattacccggagagaagaaaaatgggttgttcggtaaccttatagcgctctcactaggcctgacaccaaattttaagtcgaacttcgacttagctgaagatgccaaattgcagcttagtaaggacacgtacgatgacgatctcgacaatctactggcacaaattggagatcagtatgcggacttatttttggctgccaaaaaccttagcgatgcaatcctcctatctgacatactgagagttaatactgagattaccaaggcgccgttatccgcttcaatgatcaaaaggtacgatgaacatcaccaagacttgacacttctcaaggccctagtccgtcagcaactgcctgagaaatataaggaaatattctttgatcagtcgaaaaacgggtacgcaggttatattgacggcggagcgagtcaagaggaattctacaagtttatcaaacccatattagagaagatggatgggacggaagagttgcttgtaaaactcaatcgcgaagatctactgcgaaagcagcggactttcgacaacggtagcattccacatcaaatccacttaggcgaattgcatgctatacttagaaggcaggaggatttttatccgttcctcaaagacaatcgtgaaaagattgagaaaatcctaacctttcgcataccttactatgtgggacccctggcccgagggaactctcggttcgcatggatgacaagaaagtccgaagaaacgattactccatggaattttgaggaagttgtcgataaaggtgcgtcagctcaatcgttcatcgagaggatgaccaactttgacaagaatttaccgaacgaaaaagtattgcctaagcacagtttactttacgagtatttcacagtgtacaatgaactcacgaaagttaagtatgtcactgagggcatgcgtaaacccgcctttctaagcggagaacagaagaaagcaatagtagatctgttattcaagaccaaccgcaaagtgacagttaagcaattgaaagaggactactttaagaaaattgaatgcttcgattctgtcgagatctccggggtagaagatcgatttaatgcgtcacttggtacgtatcatgacctcctaaagataattaaagataaggacttcctggataacgaagagaatgaagatatcttagaagatatagtgttgactcttaccctctttgaagatcgggaaatgattgaggaaagactaaaaacatacgctcacctgttcgacgataaggttatgaaacagttaaagaggcgtcgctatacgggctggggacgattgtcgcggaaacttatcaacgggataagagacaagcaaagtggtaaaactattctcgattttctaaagagcgacggcttcgccaataggaactttatgcagctgatccatgatgactctttaaccttcaaagaggatatacaaaaggcacaggtttccggacaaggggactcattgcacgaacatattgcgaatcttgctggttcgccagccatcaaaaagggcatactccagacagtcaaagtagtggatgagctagttaaggtcatgggacgtcacaaaccggaaaacattgtaatcgagatggcacgcgaaaatcaaacgactcagaaggggcaaaaaaacagtcgagagcggatgaagagaatagaagagggtattaaagaactgggcagccagatcttaaaggagcatcctgtggaaaatacccaattgcagaacgagaaactttacctctattacctacaaaatggaagggacatgtatgttgatcaggaactggacataaaccgtttatctgattacgacgtcgatcacattgtaccccaatcctttttgaaggacgattcaatcgacaataaagtgcttacacgctcggataagaaccgagggaaaagtgacaatgttccaagcgaggaagtcgtaaagaaaatgaagaactattggcggcagctcctaaatgcgaaactgataacgcaaagaaagttcgataacttaactaaagctgagaggggtggcttgtctgaacttgacaaggccggatttattaaacgtcagctcgtggaaacccgccaaatcacaaagcatgttgcacagatactagattcccgaatgaatacgaaatacgacgagaacgataagctgattcgggaagtcaaagtaatcactttaaagtcaaaattggtgtcggacttcagaaaggattttcaattctataaagttagggagataaataactaccaccatgcgcacgacgcttatcttaatgccgtcgtagggaccgcactcattaagaaatacccgaagctagaaagtgagtttgtgtatggtgattacaaagtttatgacgtccgtaagatgatcgcgaaaagcgaacaggagataggcaaggctacagccaaatacttcttttattctaacattatgaatttctttaagacggaaatcactctggcaaacggagagatacgcaaacgacctttaattgaaaccaatggggagacaggtgaaatcgtatgggataagggccgggacttcgcgacggtgagaaaagttttgtccatgccccaagtcaacatagtaaagaaaactgaggtgcagaccggagggttttcaaaggaatcgattcttccaaaaaggaatagtgataagctcatcgctcgtaaaaaggactgggacccgaaaaagtacggtggcttcgagagccctacagttgcctattctgtcctagtagtggcaaaagttgagaagggaaaatccaagaaactgaagtcagtcaaagaattattggggataacgattatggagcgctcgtcttttgaaaagaaccccatcgacttccttgaggcgaaaggttacaaggaagtaaaaaaggatctcataattaaactaccaaagtatagtctgtttgagttagaaaatggccgaaaacggatgttggctagcgccggagagcttcaaaaggggaacgaactcgcactaccgtctaaatacgtgaatttcctgtatttagcgtcccattacgagaagttgaaaggttcacctgaagataacgaacagaagcaactttttgttgagcagcacaaacattatctcgacgaaatcatagagcaaatttcggaattcagtaagagagtcatcctagctgatgccaatctggacaaagtattaagcgcatacaacaagcacagggataaacccatacgtgagcaggcggaaaatattatccatttgtttactcttaccaacctcggcgctccagccgcattcaagtattttgacacaacgatagatcgcaaacagtacagatctaccaaggaggtgctagacgcgacactgattcaccaatccatcacgggattatatgaaactcggatagatttgtcacagcttgggggtgactctggtggttctggaggatctggtggttctactaatctgtcagatattattgaaaaggagaccggtaagcaactggttatccaggaatccatcctcatgctcccagaggaggtggaagaagtcattgggaacaagccggaaagcgatatactcgtgcacaccgcctacgacgagagcaccgacgagaatgtcatgcttctgactagcgacgcccctgaatacaagccttgggctctggtcatacaggatagcaacggtgagaacaagattaagatgctctctggtggttctggaggatctggtggttctactaatctgtcagatattattgaaaaggagaccggtaagcaactggttatccaggaatccatcctcatgctcccagaggaggtggaagaagtcattgggaacaagccggaaagcgatatactcgtgcacaccgcctacgacgagagcaccgacgagaatgtcatgcttctgactagcgacgcccctgaatacaagccttgggctctggtcatacaggatagcaacggtgagaacaagattaagatgctctctggtggttctcccaagaagaagaggaaagtctaa

SEQ ID NO: 20 - protein, 2014 aa, Artificial Sequence
  Synthetic Construct
MAKPAKRIKSAAAAYVPQNRDAVITDIKRIGDLQREASRLETEMNDAIAEITEKFAARIAPIKTDIETLSKGVQGWCEANRDELTNGGKVKTANLVTGDVSWRVRPPSVSIRGMDAVMETLERLGLQRFIRTKQEINKEAILLEPKAVAGVAGITVKSGIEDFSIIPFEQEAGISGSETPGTSESATPESSSETGPVAVDPTLRRRIEPHEFEVFFDPRELRKETCLLYEINWGGRHSIWRHTSQNTNKHVEVNFIEKFTTERYFCPNTRCSITWFLSWSPCGECSRAITEFLSRYPHVTLFIYIARLYHHADPRNRQGLRDLISSGVTIQIMTEQESGYCWRNFVNYSPSNEAHWPRYPHLWVRLYVLELYCIILGLPPCLNILRRKQPQLTFFTIALQSCHYQRLPPHILWATGLKSGGSSGGSSGSETPGTSESATPESSGGSSGGSDKKYSIGLAIGTNSVGWAVITDEYKVPSKKFKVLGNTDRHSIKKNLIGALLFDSGETAEATRLKRTARRRYTRRKNRICYLQEIFSNEMAKVDDSFFHRLEESFLVEEDKKHERHPIFGNIVDEVAYHEKYPTIYHLRKKLVDSTDKADLRLIYLALAHMIKFRGHFLIEGDLNPDNSDVDKLFIQLVQTYNQLFEENPINASGVDAKAILSARLSKSRRLENLIAQLPGEKKNGLFGNLIALSLGLTPNFKSNFDLAEDAKLQLSKDTYDDDLDNLLAQIGDQYADLFLAAKNLSDAILLSDILRVNTEITKAPLSASMIKRYDEHHQDLTLLKALVRQQLPEKYKEIFFDQSKNGYAGYIDGGASQEEFYKFIKPILEKMDGTEELLVKLNREDLLRKQRTFDNGSIPHQIHLGELHAILRRQEDFYPFLKDNREKIEKILTFRIPYYVGPLARGNSRFAWMTRKSEETITPWNFEEVVDKGASAQSFIERMTNFDKNLPNEKVLPKHSLLYEYFTVYNELTKVKYVTEGMRKPAFLSGEQKKAIVDLLFKTNRKVTVKQLKEDYFKKIECFDSVEISGVEDRFNASLGTYHDLLKIIKDKDFLDNEENEDILEDIVLTLTLFEDREMIEERLKTYAHLFDDKVMKQLKRRRYTGWGRLSRKLINGIRDKQSGKTILDFLKSDGFANRNFMQLIHDDSLTFKEDIQKAQVSGQGDSLHEHIANLAGSPAIKKGILQTVKVVDELVKVMGRHKPENIVIEMARENQTTQKGQKNSRERMKRIEEGIKELGSQILKEHPVENTQLQNEKLYLYYLQNGRDMYVDQELDINRLSDYDVDHIVPQSFLKDDSIDNKVLTRSDKNRGKSDNVPSEEVVKKMKNYWRQLLNAKLITQRKFDNLTKAERGGLSELDKAGFIKRQLVETRQITKHVAQILDSRMNTKYDENDKLIREVKVITLKSKLVSDFRKDFQFYKVREINNYHHAHDAYLNAVVGTALIKKYPKLESEFVYGDYKVYDVRKMIAKSEQEIGKATAKYFFYSNIMNFFKTEITLANGEIRKRPLIETNGETGEIVWDKGRDFATVRKVLSMPQVNIVKKTEVQTGGFSKESILPKRNSDKLIARKKDWDPKKYGGFESPTVAYSVLVVAKVEKGKSKKLKSVKELLGITIMERSSFEKNPIDFLEAKGYKEVKKDLIIKLPKYSLFELENGRKRMLASAGELQKGNELALPSKYVNFLYLASHYEKLKGSPEDNEQKQLFVEQHKHYLDEIIEQISEFSKRVILADANLDKVLSAYNKHRDKPIREQAENIIHLFTLTNLGAPAAFKYFDTTIDRKQYRSTKEVLDATLIHQSITGLYETRIDLSQLGGDSGGSGGSGGSTNLSDIIEKETGKQLVIQESILMLPEEVEEVIGNKPESDILVHTAYDESTDENVMLLTSDAPEYKPWALVIQDSNGENKIKMLSGGSGGSGGSTNLSDIIEKETGKQLVIQESILMLPEEVEEVIGNKPESDILVHTAYDESTDENVMLLTSDAPEYKPWALVIQDSNGENKIKMLSGGSPKKKRKV

SEQ ID NO: 21 - DNA, 5373 bp, Artificial Sequence
  Fusion protein
atggcaccgaagaagaagcgtaaagtcggaatccacggagttcctgcggcaatggacaagaagtactccattgggctcgctatcggcacaaacagcgtcggttgggccgtcattacggacgagtacaaggtgccgagcaaaaaattcaaagttctgggcaataccgatcgccacagcataaagaagaacctcattggcgccctcctgttcgactccggggagacggccgaagccacgcggctcaaaagaacagcacggcgcagatatacccgcagaaagaatcggatctgctacctgcaggagatctttagtaatgagatggctaaggtggatgactctttcttccataggctggaggagtcctttttggtggaggaggataaaaagcacgagcgccacccaatctttggcaatatcgtggacgaggtggcgtaccatgaaaagtacccaaccatatatcatctgaggaagaagcttgtagacagtactgataaggctgacttgcggttgatctatctcgcgctggcgcatatgatcaaatttcggggacacttcctcatcgagggggacctgaacccagacaacagcgatgtcgacaaactctttatccaactggttcagacttacaatcagcttttcgaagagaacccgatcaacgcatccggagttgacgccaaagcaatcctgagcgctaggctgtccaaatcccggcggctcgaaaacctcatcgcacagctccctggggagaagaagaacggcctgtttggtaatcttatcgccctgtcactcgggctgacccccaactttaaatctaacttcgacctggccgaagatgccaagcttcaactgagcaaagacacctacgatgatgatctcgacaatctgctggcccagatcggcgaccagtacgcagacctttttttggcggcaaagaacctgtcagacgccattctgctgagtgatattctgcgagtgaacacggagatcaccaaagctccgctgagcgctagtatgatcaagcgctatgatgagcaccaccaagacttgactttgctgaaggcccttgtcagacagcaactgcctgagaagtacaaggaaattttcttcgatcagtctaaaaatggctacgccggatacattgacggcggagcaagccaggaggaattttacaaatttattaagcccatcttggaaaaaatggacggcaccgaggagctgctggtaaagcttaacagagaagatctgttgcgcaaacagcgcactttcgacaatggaagcatcccccaccagattcacctgggcgaactgcacgctatcctcaggcggcaagaggatttctacccctttttgaaagataacagggaaaagattgagaaaatcctcacatttcggataccctactatgtaggccccctcgcccggggaaattccagattcgcgtggatgactcgcaaatcagaagagaccatcactccctggaacttcgaggaagtcgtggataagggggcctctgcccagtccttcatcgaaaggatgactaactttgataaaaatctgcctaacgaaaaggtgcttcctaaacactctctgctgtacgagtacttcacagtttataacgagctcaccaaggtcaaatacgtcacagaagggatgagaaagccagcattcctgtctggagagcagaagaaagctatcgtggacctcctcttcaagacgaaccggaaagttaccgtgaaacagctcaaagaagactatttcaaaaagattgaatgtttcgactctgttgaaatcagcggagtggaggatcgcttcaacgcatccctgggaacgtatcacgatctcctgaaaatcattaaagacaaggacttcctggacaatgaggagaacgaggacattcttgaggacattgtcctcacccttacgttgtttgaagatagggagatgattgaagaacgcttgaaaacttacgctcatctcttcgacgacaaagtcatgaaacagctcaagaggcgccgatatacaggatgggggcggctgtcaagaaaactgatcaatgggatccgagacaagcagagtggaaagacaatcctggattttcttaagtccgatggatttgccaaccggaacttcatgcagttgatccatgatgactctctcacctttaaggaggacatccagaaagcacaagtttctggccagggggacagtcttcacgagcacatcgctaatcttgcaggtagcccagctatcaaaaagggaatactgcagaccgttaaggtcgtggatgaactcgtcaaagtaatgggaaggcataagcccgagaatatcgttatcgagatggcccgagagaaccaaactacccagaagggacagaagaacagtagggaaaggatgaagaggattgaagagggtataaaagaactggggtcccaaatccttaaggaacacccagttgaaaacacccagcttcagaatgagaagctctacctgtactacctgcagaacggcagggacatgtacgtggatcaggaactggacatcaatcggctctccgactacgacgtggatcatatcgtgccccagtcttttctcaaagatgattctattgataataaagtgttgacaagatccgataaaaatagagggaagagtgataacgtcccctcagaagaagttgtcaagaaaatgaaaaattattggcggcagctgctgaacgccaaactgatcacacaacggaagttcgataatctgactaaggctgaacgaggtggcctgtctgagttggataaagccggcttcatcaaaaggcagcttgttgagacacgccagatcaccaagcacgtggcccaaattctcgattcacgcatgaacaccaagtacgatgaaaatgacaaactgattcgagaggtgaaagttattactctgaagtctaagctggtctcagatttcagaaaggactttcagttttataaggtgagagagatcaacaattaccaccatgcgcatgatgcctacctgaatgcagtggtaggcactgcacttatcaaaaaatatcccaagcttgaatctgaatttgtttacggagactataaagtgtacgatgttaggaaaatgatcgcaaagtctgagcaggaaataggcaaggccaccgctaagtacttcttttacagcaatattatgaattttttcaagaccgagattacactggccaatggagagattcggaagcgaccacttatcgaaacaaacggagaaacaggagaaatcgtgtgggacaagggtagggatttcgcgacagtccggaaggtcctgtccatgccgcaggtgaacatcgttaaaaagaccgaagtacagaccggaggcttctccaaggaaagtatcctcccgaaaaggaacagcgacaagctgatcgcacgcaaaaaagattgggaccccaagaaatacggcggattcgtgtctcctacagtcgcttacagtgtactggttgtggccaaagtggagaaagggaagtctaaaaaactcaaaagcgtcaaggaactgctgggcatcacaatcatggagcgatcaagcttcgaaaaaaaccccatcgactttctcgaggcgaaaggatataaagaggtcaaaaaagacctcatcattaagcttcccaagtactctctctttgagcttgaaaacggccggaaacgaatgctcgctagtgcgggcgagctgcagaaaggtaacgagctggcactgccctctaaatacgttaatttcttgtatctggccagccactatgaaaagctcaaagggtctcccgaagataatgagcagaagcagctgttcgtggaacaacacaaacactaccttgatgagatcatcgagcaaataagcgaattctccaaaagagtgatcctcgccgacgctaacctcgataaggtgctttctgcttacaataagcacagggataagcccatcagggagcaggcagaaaacattatccacttgtttactctgaccaacttgggcgcgcctgcagccttcaagtacttcgacaccaccatagacagaaagcagtacagatctacaaaggaggtcctggacgccacactgattcatcagtcaattacggggctctatgaaacaagaatcgacctctctcagctcggtggagacagcagggctgaccccaagaagaagaggaaggtgggtggaggaggtaccggcggtggaggctcagcagaatacgtacgagctctgtttgacttcaatgggaatgacgaggaggatctcccctttaagaagggcgatattctccgcatcagagataagcccgaagaacaatggtggaatgccgaggatagcgaagggaaaaggggcatgattctggtgccatatgtggagaaatattccggtgactacaaagaccatgatggggattacaaagaccacgacatcgactacaaagacgacgacgataaatcagggatgacagacgccgagtacgtgcgcattcatgagaaactggatatttacaccttcaagaagcagttcttcaacaacaagaaatctgtgtcacaccgctgctacgtgctgtttgagttgaagcgaaggggcgaaagaagggcttgcttttggggctatgccgtcaacaagccccaaagtggcaccgagagaggaatacacgctgagatattcagtatccgaaaggtggaagagtatcttcgggataatcctgggcagtttacgatcaactggtattccagctggagtccttgcgctgattgtgccgagaaaattctggaatggtataatcaggaacttcggggaaacgggcacacattgaaaatctgggcctgcaagctgtactacgagaagaatgcccggaaccagataggactctggaatctgagggacaatggtgtaggcctgaacgtgatggtttccgagcactatcagtgttgtcggaagattttcatccaaagctctcataaccagctcaatgaaaaccgctggttggagaaaacactgaaacgtgcggagaagtggagatccgagctgagcatcatgatccaggtcaagattctgcataccactaagtctccagccgttggtcccaagaagaaaagaaaagtcggtaccatgaccaacctttccgacatcatagagaaggaaacaggcaaacagttggtcatccaagagtcgatactcatgcttcctgaagaagttgaggaggtcattgggaataagccggaaagtgacattctcgtacacactgcgtatgatgagagcaccgatgagaacgtgatgctgctcacgtcagatgccccagagtacaaaccctgggctctggtgattcaggactctaatggagagaacaagatcaagatgcta

SEQ ID NO: 22 - protein, 1791 aa, Artificial Sequence
  Fusion protein
MAPKKKRKVGIHGVPAAMDKKYSIGLAIGTNSVGWAVITDEYKVPSKKFKVLGNTDRHSIKKNLIGALLFDSGETAEATRLKRTARRRYTRRKNRICYLQEIFSNEMAKVDDSFFHRLEESFLVEEDKKHERHPIFGNIVDEVAYHEKYPTIYHLRKKLVDSTDKADLRLIYLALAHMIKFRGHFLIEGDLNPDNSDVDKLFIQLVQTYNQLFEENPINASGVDAKAILSARLSKSRRLENLIAQLPGEKKNGLFGNLIALSLGLTPNFKSNFDLAEDAKLQLSKDTYDDDLDNLLAQIGDQYADLFLAAKNLSDAILLSDILRVNTEITKAPLSASMIKRYDEHHQDLTLLKALVRQQLPEKYKEIFFDQSKNGYAGYIDGGASQEEFYKFIKPILEKMDGTEELLVKLNREDLLRKQRTFDNGSIPHQIHLGELHAILRRQEDFYPFLKDNREKIEKILTFRIPYYVGPLARGNSRFAWMTRKSEETITPWNFEEVVDKGASAQSFIERMTNFDKNLPNEKVLPKHSLLYEYFTVYNELTKVKYVTEGMRKPAFLSGEQKKAIVDLLFKTNRKVTVKQLKEDYFKKIECFDSVEISGVEDRFNASLGTYHDLLKIIKDKDFLDNEENEDILEDIVLTLTLFEDREMIEERLKTYAHLFDDKVMKQLKRRRYTGWGRLSRKLINGIRDKQSGKTILDFLKSDGFANRNFMQLIHDDSLTFKEDIQKAQVSGQGDSLHEHIANLAGSPAIKKGILQTVKVVDELVKVMGRHKPENIVIEMARENQTTQKGQKNSRERMKRIEEGIKELGSQILKEHPVENTQLQNEKLYLYYLQNGRDMYVDQELDINRLSDYDVDHIVPQSFLKDDSIDNKVLTRSDKNRGKSDNVPSEEVVKKMKNYWRQLLNAKLITQRKFDNLTKAERGGLSELDKAGFIKRQLVETRQITKHVAQILDSRMNTKYDENDKLIREVKVITLKSKLVSDFRKDFQFYKVREINNYHHAHDAYLNAVVGTALIKKYPKLESEFVYGDYKVYDVRKMIAKSEQEIGKATAKYFFYSNIMNFFKTEITLANGEIRKRPLIETNGETGEIVWDKGRDFATVRKVLSMPQVNIVKKTEVQTGGFSKESILPKRNSDKLIARKKDWDPKKYGGFVSPTVAYSVLVVAKVEKGKSKKLKSVKELLGITIMERSSFEKNPIDFLEAKGYKEVKKDLIIKLPKYSLFELENGRKRMLASAGELQKGNELALPSKYVNFLYLASHYEKLKGSPEDNEQKQLFVEQHKHYLDEIIEQISEFSKRVILADANLDKVLSAYNKHRDKPIREQAENIIHLFTLTNLGAPAAFKYFDTTIDRKQYRSTKEVLDATLIHQSITGLYETRIDLSQLGGDSRADPKKKRKVGGGGTGGGGSAEYVRALFDFNGNDEEDLPFKKGDILRIRDKPEEQWWNAEDSEGKRGMILVPYVEKYSGDYKDHDGDYKDHDIDYKDDDDKSGMTDAEYVRIHEKLDIYTFKKQFFNNKKSVSHRCYVLFELKRRGERRACFWGYAVNKPQSGTERGIHAEIFSIRKVEEYLRDNPGQFTINWYSSWSPCADCAEKILEWYNQELRGNGHTLKIWACKLYYEKNARNQIGLWNLRDNGVGLNVMVSEHYQCCRKIFIQSSHNQLNENRWLEKTLKRAEKWRSELSIMIQVKILHTTKSPAVGPKKKRKVGTMTNLSDIIEKETGKQLVIQESILMLPEEVEEVIGNKPESDILVHTAYDESTDENVMLLTSDAPEYKPWALVIQDSNGENKIKML

SEQ ID NO: 23 - DNA, 5373 bp, Artificial Sequence
  Fusion protein
atggcaccgaagaagaagcgtaaagtcggaatccacggagttcctgcggcaatggacaagaagtactccattgggctcgctatcggcacaaacagcgtcggttgggccgtcattacggacgagtacaaggtgccgagcaaaaaattcaaagttctgggcaataccgatcgccacagcataaagaagaacctcattggcgccctcctgttcgactccggggagacggccgaagccacgcggctcaaaagaacagcacggcgcagatatacccgcagaaagaatcggatctgctacctgcaggagatctttagtaatgagatggctaaggtggatgactctttcttccataggctggaggagtcctttttggtggaggaggataaaaagcacgagcgccacccaatctttggcaatatcgtggacgaggtggcgtaccatgaaaagtacccaaccatatatcatctgaggaagaagcttgtagacagtactgataaggctgacttgcggttgatctatctcgcgctggcgcatatgatcaaatttcggggacacttcctcatcgagggggacctgaacccagacaacagcgatgtcgacaaactctttatccaactggttcagacttacaatcagcttttcgaagagaacccgatcaacgcatccggagttgacgccaaagcaatcctgagcgctaggctgtccaaatcccggcggctcgaaaacctcatcgcacagctccctggggagaagaagaacggcctgtttggtaatcttatcgccctgtcactcgggctgacccccaactttaaatctaacttcgacctggccgaagatgccaagcttcaactgagcaaagacacctacgatgatgatctcgacaatctgctggcccagatcggcgaccagtacgcagacctttttttggcggcaaagaacctgtcagacgccattctgctgagtgatattctgcgagtgaacacggagatcaccaaagctccgctgagcgctagtatgatcaagcgctatgatgagcaccaccaagacttgactttgctgaaggcccttgtcagacagcaactgcctgagaagtacaaggaaattttcttcgatcagtctaaaaatggctacgccggatacattgacggcggagcaagccaggaggaattttacaaatttattaagcccatcttggaaaaaatggacggcaccgaggagctgctggtaaagcttaacagagaagatctgttgcgcaaacagcgcactttcgacaatggaagcatcccccaccagattcacctgggcgaactgcacgctatcctcaggcggcaagaggatttctacccctttttgaaagataacagggaaaagattgagaaaatcctcacatttcggataccctactatgtaggccccctcgcccggggaaattccagattcgcgtggatgactcgcaaatcagaagagaccatcactccctggaacttcgaggaagtcgtggataagggggcctctgcccagtccttcatcgaaaggatgactaactttgataaaaatctgcctaacgaaaaggtgcttcctaaacactctctgctgtacgagtacttcacagtttataacgagctcaccaaggtcaaatacgtcacagaagggatgagaaagccagcattcctgtctggagagcagaagaaagctatcgtggacctcctcttcaagacgaaccggaaagttaccgtgaaacagctcaaagaagactatttcaaaaagattgaatgtttcgactctgttgaaatcagcggagtggaggatcgcttcaacgcatccctgggaacgtatcacgatctcctgaaaatcattaaagacaaggacttcctggacaatgaggagaacgaggacattcttgaggacattgtcctcacccttacgttgtttgaagatagggagatgattgaagaacgcttgaaaacttacgctcatctcttcgacgacaaagtcatgaaacagctcaagaggcgccgatatacaggatgggggcggctgtcaagaaaactgatcaatgggatccgagacaagcagagtggaaagacaatcctggattttcttaagtccgatggatttgccaaccggaacttcatgcagttgatccatgatgactctctcacctttaaggaggacatccagaaagcacaagtttctggccagggggacagtcttcacgagcacatcgctaatcttgcaggtagcccagctatcaaaaagggaatactgcagaccgttaaggtcgtggatgaactcgtcaaagtaatgggaaggcataagcccgagaatatcgttatcgagatggcccgagagaaccaaactacccagaagggacagaagaacagtagggaaaggatgaagaggattgaagagggtataaaagaactggggtcccaaatccttaaggaacacccagttgaaaacacccagcttcagaatgagaagctctacctgtactacctgcagaacggcagggacatgtacgtggatcaggaactggacatcaatcggctctccgactacgacgtggatcatatcgtgccccagtcttttctcaaagatgattctattgataataaagtgttgacaagatccgataaaaatagagggaagagtgataacgtcccctcagaagaagttgtcaagaaaatgaaaaattattggcggcagctgctgaacgccaaactgatcacacaacggaagttcgataatctgactaaggctgaacgaggtggcctgtctgagttggataaagccggcttcatcaaaaggcagcttgttgagacacgccagatcaccaagcacgtggcccaaattctcgattcacgcatgaacaccaagtacgatgaaaatgacaaactgattcgagaggtgaaagttattactctgaagtctaagctggtctcagatttcagaaaggactttcagttttataaggtgagagagatcaacaattaccaccatgcgcatgatgcctacctgaatgcagtggtaggcactgcacttatcaaaaaatatcccaagcttgaatctgaatttgtttacggagactataaagtgtacgatgttaggaaaatgatcgcaaagtctgagcaggaaataggcaaggccaccgctaagtacttcttttacagcaatattatgaattttttcaagaccgagattacactggccaatggagagattcggaagcgaccacttatcgaaacaaacggagaaacaggagaaatcgtgtgggacaagggtagggatttcgcgacagtccggaaggtcctgtccatgccgcaggtgaacatcgttaaaaagaccgaagtacagaccggaggcttctccaaggaaagtatcctcccgaaaaggaacagcgacaagctgatcgcacgcaaaaaagattgggaccccaagaaatacggcggattcgagtctcctacagtcgcttacagtgtactggttgtggccaaagtggagaaagggaagtctaaaaaactcaaaagcgtcaaggaactgctgggcatcacaatcatggagcgatcaagcttcgaaaaaaaccccatcgactttctcgaggcgaaaggatataaagaggtcaaaaaagacctcatcattaagcttcccaagtactctctctttgagcttgaaaacggccggaaacgaatgctcgctagtgcgggcgagctgcagaaaggtaacgagctggcactgccctctaaatacgttaatttcttgtatctggccagccactatgaaaagctcaaagggtctcccgaagataatgagcagaagcagctgttcgtggaacaacacaaacactaccttgatgagatcatcgagcaaataagcgaattctccaaaagagtgatcctcgccgacgctaacctcgataaggtgctttctgcttacaataagcacagggataagcccatcagggagcaggcagaaaacattatccacttgtttactctgaccaacttgggcgcgcctgcagccttcaagtacttcgacaccaccatagacagaaagcagtacagatctacaaaggaggtcctggacgccacactgattcatcagtcaattacggggctctatgaaacaagaatcgacctctctcagctcggtggagacagcagggctgaccccaagaagaagaggaaggtgggtggaggaggtaccggcggtggaggctcagcagaatacgtacgagctctgtttgacttcaatgggaatgacgaggaggatctcccctttaagaagggcgatattctccgcatcagagataagcccgaagaacaatggtggaatgccgaggatagcgaagggaaaaggggcatgattctggtgccatatgtggagaaatattccggtgactacaaagaccatgatggggattacaaagaccacgacatcgactacaaagacgacgacgataaatcagggatgacagacgccgagtacgtgcgcattcatgagaaactggatatttacaccttcaagaagcagttcttcaacaacaagaaatctgtgtcacaccgctgctacgtgctgtttgagttgaagcgaaggggcgaaagaagggcttgcttttggggctatgccgtcaacaagccccaaagtggcaccgagagaggaatacacgctgagatattcagtatccgaaaggtggaagagtatcttcgggataatcctgggcagtttacgatcaactggtattccagctggagtccttgcgctgattgtgccgagaaaattctggaatggtataatcaggaacttcggggaaacgggcacacattgaaaatctgggcctgcaagctgtactacgagaagaatgcccggaaccagataggactctggaatctgagggacaatggtgtaggcctgaacgtgatggtttccgagcactatcagtgttgtcggaagattttcatccaaagctctcataaccagctcaatgaaaaccgctggttggagaaaacactgaaacgtgcggagaagtggagatccgagctgagcatcatgatccaggtcaagattctgcataccactaagtctccagccgttggtcccaagaagaaaagaaaagtcggtaccatgaccaacctttccgacatcatagagaaggaaacaggcaaacagttggtcatccaagagtcgatactcatgcttcctgaagaagttgaggaggtcattgggaataagccggaaagtgacattctcgtacacactgcgtatgatgagagcaccgatgagaacgtgatgctgctcacgtcagatgccccagagtacaaaccctgggctctggtgattcaggactctaatggagagaacaagatcaagatgcta

SEQ ID NO: 24 - protein, 1791 aa, Artificial Sequence
  Fusion protein
MAPKKKRKVGIHGVPAAMDKKYSIGLAIGTNSVGWAVITDEYKVPSKKFKVLGNTDRHSIKKNLIGALLFDSGETAEATRLKRTARRRYTRRKNRICYLQEIFSNEMAKVDDSFFHRLEESFLVEEDKKHERHPIFGNIVDEVAYHEKYPTIYHLRKKLVDSTDKADLRLIYLALAHMIKFRGHFLIEGDLNPDNSDVDKLFIQLVQTYNQLFEENPINASGVDAKAILSARLSKSRRLENLIAQLPGEKKNGLFGNLIALSLGLTPNFKSNFDLAEDAKLQLSKDTYDDDLDNLLAQIGDQYADLFLAAKNLSDAILLSDILRVNTEITKAPLSASMIKRYDEHHQDLTLLKALVRQQLPEKYKEIFFDQSKNGYAGYIDGGASQEEFYKFIKPILEKMDGTEELLVKLNREDLLRKQRTFDNGSIPHQIHLGELHAILRRQEDFYPFLKDNREKIEKILTFRIPYYVGPLARGNSRFAWMTRKSEETITPWNFEEVVDKGASAQSFIERMTNFDKNLPNEKVLPKHSLLYEYFTVYNELTKVKYVTEGMRKPAFLSGEQKKAIVDLLFKTNRKVTVKQLKEDYFKKIECFDSVEISGVEDRFNASLGTYHDLLKIIKDKDFLDNEENEDILEDIVLTLTLFEDREMIEERLKTYAHLFDDKVMKQLKRRRYTGWGRLSRKLINGIRDKQSGKTILDFLKSDGFANRNFMQLIHDDSLTFKEDIQKAQVSGQGDSLHEHIANLAGSPAIKKGILQTVKVVDELVKVMGRHKPENIVIEMARENQTTQKGQKNSRERMKRIEEGIKELGSQILKEHPVENTQLQNEKLYLYYLQNGRDMYVDQELDINRLSDYDVDHIVPQSFLKDDSIDNKVLTRSDKNRGKSDNVPSEEVVKKMKNYWRQLLNAKLITQRKFDNLTKAERGGLSELDKAGFIKRQLVETRQITKHVAQILDSRMNTKYDENDKLIREVKVITLKSKLVSDFRKDFQFYKVREINNYHHAHDAYLNAVVGTALIKKYPKLESEFVYGDYKVYDVRKMIAKSEQEIGKATAKYFFYSNIMNFFKTEITLANGEIRKRPLIETNGETGEIVWDKGRDFATVRKVLSMPQVNIVKKTEVQTGGFSKESILPKRNSDKLIARKKDWDPKKYGGFESPTVAYSVLVVAKVEKGKSKKLKSVKELLGITIMERSSFEKNPIDFLEAKGYKEVKKDLIIKLPKYSLFELENGRKRMLASAGELQKGNELALPSKYVNFLYLASHYEKLKGSPEDNEQKQLFVEQHKHYLDEIIEQISEFSKRVILADANLDKVLSAYNKHRDKPIREQAENIIHLFTLTNLGAPAAFKYFDTTIDRKQYRSTKEVLDATLIHQSITGLYETRIDLSQLGGDSRADPKKKRKVGGGGTGGGGSAEYVRALFDFNGNDEEDLPFKKGDILRIRDKPEEQWWNAEDSEGKRGMILVPYVEKYSGDYKDHDGDYKDHDIDYKDDDDKSGMTDAEYVRIHEKLDIYTFKKQFFNNKKSVSHRCYVLFELKRRGERRACFWGYAVNKPQSGTERGIHAEIFSIRKVEEYLRDNPGQFTINWYSSWSPCADCAEKILEWYNQELRGNGHTLKIWACKLYYEKNARNQIGLWNLRDNGVGLNVMVSEHYQCCRKIFIQSSHNQLNENRWLEKTLKRAEKWRSELSIMIQVKILHTTKSPAVGPKKKRKVGTMTNLSDIIEKETGKQLVIQESILMLPEEVEEVIGNKPESDILVHTAYDESTDENVMLLTSDAPEYKPWALVIQDSNGENKIKML

SEQ ID NO: 25 - DNA, 4335 bp, Artificial Sequence
  Fusion protein
  CDS (1)..(4335)
atggggaaacggaactacatcctggggcttgccattgggataaccagcgttggctacggaattattgattatgagacacgcgatgtgattgacgccggggttaggctgttcaaagaggccaacgttgaaaacaacgagggaagacggagtaagcgcggagcaagaagactcaagcgcagacggagacatcggattcagagggtgaaaaagctgctcttcgattacaatctcctgaccgatcatagtgagctgagcggaatcaacccctacgaggcgcgagtgaaagggctttcccagaagctgtccgaagaggagttctccgccgcgttgctgcacctggccaaacggaggggggttcacaatgtaaacgaagtggaggaggacacgggcaatgaacttagtacgaaagaacagatcagtaggaactctaaggctctcgaagagaaatacgtcgctgagttgcagcttgagagactgaaaaaagacggcgaagtacgcggatctattaataggttcaagacttcagattacgtaaaggaagccaagcagctcctgaaagtacagaaagcgtaccatcagctcgatcagagcttcatcgatacctacatagatttgctggagacacggaggacatactacgagggcccaggggaaggatctccttttgggtggaaggacatcaaggaatggtacgagatgcttatgggacattgtacatattttccggaggagctcaggagcgtcaagtacgcctacaatgccgacctgtacaatgccctcaatgacctcaataacctcgtgattaccagggacgagaacgagaagctggagtactatgaaaagttccagattatcgagaatgtgtttaagcagaagaagaagccgacacttaagcagattgcaaaggaaatcctcgtgaatgaggaagatatcaagggatacagagtgacaagtacaggcaagcccgagttcacaaatctgaaggtgtaccacgatattaaggacataaccgcacgaaaggagataatcgaaaacgctgagctcctcgatcagatcgcaaaaattcttaccatctaccagtctagtgaggacattcaggaggaactgactaatctgaacagtgagctcacccaagaggaaattgagcagatttcaaacctgaaaggctacaccgggacgcacaatctgagcctcaaagcaatcaacctcattctggatgaactttggcacacaaatgacaaccaaattgccatattcaaccgcctgaaactggtgccaaaaaaagtggatctgtcacagcaaaaggaaatccctacaaccttggttgacgattttattctgtcccccgttgtcaagcggagcttcatccagtcaatcaaggtgatcaatgccatcattaaaaaatacggattgccaaacgatataattatcgagcttgcacgagagaagaactcaaaggacgcccagaagatgattaacgaaatgcagaagcgcaaccgccagacaaacgaacgcatagaggaaattataagaacaaccggcaaagagaatgccaagtatctgatcgagaaaatcaagctgcacgacatgcaagaaggcaagtgcctgtactctctggaagctatcccactcgaagatctgctgaataatccattcaattacgaggtggaccacatcatccctagatccgtaagctttgacaattccttcaataacaaagttctggttaaacaggaggaaaattctaaaaaagggaaccggaccccgttccagtacctgagctccagtgacagcaagattagctacgagacttttaagaaacatattctgaatctggccaaaggcaaaggcaggatcagcaagaccaagaaggagtacctcctcgaagaacgcgacattaacagatttagtgtgcagaaagatttcatcaaccgaaaccttgtcgatactcggtacgccacgagaggcctgatgaatctcctcaggagctacttccgcgtcaataatctggacgttaaagtcaagagcataaatgggggattcaccagctttctgaggagaaagtggaagtttaagaaggaacgaaacaaaggatacaagcaccatgctgaggatgctttgatcatcgctaacgcggactttatctttaaggaatggaaaaagctggataaggcaaagaaagtgatggaaaaccagatgttcgaggagaagcaggcagagtcaatgcctgagatcgagacagagcaggaatacaaggaaattttcatcacccctcatcagattaaacacataaaggacttcaaagactataaatactctcatagggtggacaaaaaacccaatcgcaagctcattaatgacaccctgtactcaacacggaaggatgataaaggtaataccttgattgtgaataatcttaatggattgtatgacaaagataacgacaagctcaagaagctgatcaacaagtctccagagaagctccttatgtatcaccacgacccacagacttatcagaaattgaaactgatcatggagcaatacggggatgagaagaacccactctacaaatattatgaggaaacaggtaattacctgaccaagtactccaagaaggataacggaccagtgatcaaaaagataaagtactatggcaacaaacttaatgcgcatttggacataactgacgattaccccaattctcgaaacaaggttgtgaagctctccctgaagccttatagatttgacgtgtacctggataatggggtttataaattcgtcaccgtgaaaaatctggacgtgatcaaaaaggagaactattatgaagtaaactcaaagtgctatgaggaggcgaagaagctgaagaagatctccaatcaggccgagttcatcgcttccttctataagaacgatctcatcaagatcaatggagagctttatcgcgtcattggtgtgaacaatgacttgctgaacaggatcgaagtcaatatgatagacattacctaccgggagtatctcgaaaacatgaatgataaacggccgcctcacatcatcaagacaatcgcatctaaaactcagtcaataaaaaagtactctaccgatatcctggggaatctctatgaagtgaagtcaaagaagcacccacaaatcattaaaaaaggtggatcccccaagaagaagaggaaagtcgtacgagctctgtttgacttcaatgggaatgacgaggaggatctcccctttaagaagggcgatattctccgcatcagagataagcccgaagaacaatggtggaatgccgaggatagcgaagggaaaaggggcatgattctggtgccatatgtggagaaatattccggtgactacaaagaccatgatggggattacaaagaccacgacatcgactacaaagacgacgacgataaatcagggatgacagacgccgagtacgtgcgcattcatgagaaactggatatttacaccttcaagaagcagttcttcaacaacaagaaatctgtgtcacaccgctgctacgtgctgtttgagttgaagcgaaggggcgaaagaagggcttgcttttggggctatgccgtcaacaagccccaaagtggcaccgagagaggaatacacgctgagatattcagtatccgaaaggtggaagagtatcttcgggataatcctgggcagtttacgatcaactggtattccagctggagtccttgcgctgattgtgccgagaaaattctggaatggtataatcaggaacttcggggaaacgggcacacattgaaaatctgggcctgcaagctgtactacgagaagaatgcccggaaccagataggactctggaatctgagggacaatggtgtaggcctgaacgtgatggtttccgagcactatcagtgttgtcggaagattttcatccaaagctctcataaccagctcaatgaaaaccgctggttggagaaaacactgaaacgtgcggagaagtggagatccgagctgagcatcatgatccaggtcaagattctgcataccactaagtctccagccgttggtcccaagaagaaaagaaaagtcggtaccatgaccaacctttccgacatcatagagaaggaaacaggcaaacagttggtcatccaagagtcgatactcatgcttcctgaagaagttgaggaggtcattgggaataagccggaaagtgacattctcgtacacactgcgtatgatgagagcaccgatgagaacgtgatgctgctcacgtcagatgccccagagtacaaaccctgggctctggtgattcaggactctaatggagagaacaagatcaagatgcta

SEQ ID NO: 26 - protein, 1445 aa, Artificial Sequence
  Synthetic Construct
MGKRNYILGLAIGITSVGYGIIDYETRDVIDAGVRLFKEANVENNEGRRSKRGARRLKRRRRHRIQRVKKLLFDYNLLTDHSELSGINPYEARVKGLSQKLSEEEFSAALLHLAKRRGVHNVNEVEEDTGNELSTKEQISRNSKALEEKYVAELQLERLKKDGEVRGSINRFKTSDYVKEAKQLLKVQKAYHQLDQSFIDTYIDLLETRRTYYEGPGEGSPFGWKDIKEWYEMLMGHCTYFPEELRSVKYAYNADLYNALNDLNNLVITRDENEKLEYYEKFQIIENVFKQKKKPTLKQIAKEILVNEEDIKGYRVTSTGKPEFTNLKVYHDIKDITARKEIIENAELLDQIAKILTIYQSSEDIQEELTNLNSELTQEEIEQISNLKGYTGTHNLSLKAINLILDELWHTNDNQIAIFNRLKLVPKKVDLSQQKEIPTTLVDDFILSPVVKRSFIQSIKVINAIIKKYGLPNDIIIELAREKNSKDAQKMINEMQKRNRQTNERIEEIIRTTGKENAKYLIEKIKLHDMQEGKCLYSLEAIPLEDLLNNPFNYEVDHIIPRSVSFDNSFNNKVLVKQEENSKKGNRTPFQYLSSSDSKISYETFKKHILNLAKGKGRISKTKKEYLLEERDINRFSVQKDFINRNLVDTRYATRGLMNLLRSYFRVNNLDVKVKSINGGFTSFLRRKWKFKKERNKGYKHHAEDALIIANADFIFKEWKKLDKAKKVMENQMFEEKQAESMPEIETEQEYKEIFITPHQIKHIKDFKDYKYSHRVDKKPNRKLINDTLYSTRKDDKGNTLIVNNLNGLYDKDNDKLKKLINKSPEKLLMYHHDPQTYQKLKLIMEQYGDEKNPLYKYYEETGNYLTKYSKKDNGPVIKKIKYYGNKLNAHLDITDDYPNSRNKVVKLSLKPYRFDVYLDNGVYKFVTVKNLDVIKKENYYEVNSKCYEEAKKLKKISNQAEFIASFYKNDLIKINGELYRVIGVNNDLLNRIEVNMIDITYREYLENMNDKRPPHIIKTIASKTQSIKKYSTDILGNLYEVKSKKHPQIIKKGGSPKKKRKVVRALFDFNGNDEEDLPFKKGDILRIRDKPEEQWWNAEDSEGKRGMILVPYVEKYSGDYKDHDGDYKDHDIDYKDDDDKSGMTDAEYVRIHEKLDIYTFKKQFFNNKKSVSHRCYVLFELKRRGERRACFWGYAVNKPQSGTERGIHAEIFSIRKVEEYLRDNPGQFTINWYSSWSPCADCAEKILEWYNQELRGNGHTLKIWACKLYYEKNARNQIGLWNLRDNGVGLNVMVSEHYQCCRKIFIQSSHNQLNENRWLEKTLKRAEKWRSELSIMIQVKILHTTKSPAVGPKKKRKVGTMTNLSDIIEKETGKQLVIQESILMLPEEVEEVIGNKPESDILVHTAYDESTDENVMLLTSDAPEYKPWALVIQDSNGENKIKML

SEQ ID NO: 27 - DNA, 2106 bp, Homo sapiens
  CDS (1)..(2106)
atggatatagaagatgaagaaaacatgagttccagcagcactgatgtgaaggaaaaccgcaatctggacaacgtgtcccccaaggatggcagcacacctgggcctggcgagggctctcagctctccaatgggggtggtggtggccccggcagaaagcggcccctggaggagggcagcaatggccactccaagtaccgcctgaagaaaaggaggaaaacaccagggcccgtcctccccaagaacgccctgatgcagctgaatgagatcaagcctggtttgcagtacacactcctgtcccagactgggcccgtgcacgcgcctttgtttgtcatgtctgtggaggtgaatggccaggtttttgagggctctggtcccacaaagaaaaaggcaaaactccatgctgctgagaaggccttgaggtctttcgttcagtttcctaatgcctctgaggcccacctggccatggggaggaccctgtctgtcaacacggacttcacatctgaccaggccgacttccctgacacgctcttcaatggttttgaaactcctgacaaggcggagcctcccttttacgtgggctccaatggggatgactccttcagttccagcggggacctcagcttgtctgcttccccggtgcctgccagcctagcccagcctcctctccctgccttaccaccattcccacccccgagtgggaagaatcccgtgatgatcttgaacgaactgcgcccaggactcaagtatgacttcctctccgagagcggggagagccatgccaagagcttcgtcatgtctgtggtcgtggatggtcagttctttgaaggctcggggagaaacaagaagcttgccaaggcccgggctgcgcagtctgccctggccgccatttttaacttgcacttggatcagacgccatctcgccagcctattcccagtgagggtcttcagctgcatttaccgcaggttttagctgacgctgtctcacgcctggtcctgggtaagtttggtgacctgaccgacaacttctcctcccctcacgctcgcagaaaagtgctggctggagtcgtcatgacaacaggcacagatgttaaagatgccaaggtgataagtgtttctacaggaacaaaatgtattaatggtgaatacatgagtgatcgtggccttgcattaaatgactgccatgcagaaataatatctcggagatccttgctcagatttctttatacacaacttgagctttacttaaataacaaagatgatcaaaaaagatccatctttcagaaatcagagcgaggggggtttaggctgaaggagaatgtccagtttcatctgtacatcagcacctctccctgtggagatgccagaatcttctcaccacatgagccaatcctggaagaaccagcagatagacacccaaatcgtaaagcaagaggacagctacggaccaaaatagagtctggtgaggggacgattccagtgcgctccaatgcgagcatccaaacgtgggacggggtgctgcaaggggagcggctgctcaccatgtcctgcagtgacaagattgcacgctggaacgtggtgggcatccagggatccctgctcagcattttcgtggagcccatttacttctcgagcatcatcctgggcagcctttaccacggggaccacctttccagggccatgtaccagcggatctccaacatagaggacctgccacctctctacaccctcaacaagcctttgctcagtggcatcagcaatgcagaagcacggcagccagggaaggcccccaacttcagtgtcaactggacggtaggcgactccgctattgaggtcatcaacgccacgactgggaaggatgagctgggccgcgcgtcccgcctgtgtaagcacgcgttgtactgtcgctggatgcgtgtgcacggcaaggttccctcccacttactacgctccaagattaccaaacccaacgtgtaccatgagtccaagctggcggcaaaggagtaccaggccgccaaggcgcgtctgttcacagccttcatcaaggcggggctgggggcctgggtggagaagcccaccgagcaggaccagttctcactcacgccctga

SEQ ID NO: 28 - protein, 701 aa, Homo sapiens
MDIEDEENMSSSSTDVKENRNLDNVSPKDGSTPGPGEGSQLSNGGGGGPGRKRPLEEGSNGHSKYRLKKRRKTPGPVLPKNALMQLNEIKPGLQYTLLSQTGPVHAPLFVMSVEVNGQVFEGSGPTKKKAKLHAAEKALRSFVQFPNASEAHLAMGRTLSVNTDFTSDQADFPDTLFNGFETPDKAEPPFYVGSNGDDSFSSSGDLSLSASPVPASLAQPPLPALPPFPPPSGKNPVMILNELRPGLKYDFLSESGESHAKSFVMSVVVDGQFFEGSGRNKKLAKARAAQSALAAIFNLHLDQTPSRQPIPSEGLQLHLPQVLADAVSRLVLGKFGDLTDNFSSPHARRKVLAGVVMTTGTDVKDAKVISVSTGTKCINGEYMSDRGLALNDCHAEIISRRSLLRFLYTQLELYLNNKDDQKRSIFQKSERGGFRLKENVQFHLYISTSPCGDARIFSPHEPILEEPADRHPNRKARGQLRTKIESGEGTIPVRSNASIQTWDGVLQGERLLTMSCSDKIARWNVVGIQGSLLSIFVEPIYFSSIILGSLYHGDHLSRAMYQRISNIEDLPPLYTLNKPLLSGISNAEARQPGKAPNFSVNWTVGDSAIEVINATTGKDELGRASRLCKHALYCRWMRVHGKVPSHLLRSKITKPNVYHESKLAAKEYQAAKARLFTAFIKAGLGAWVEKPTEQDQFSLTP

SEQ ID NO: 29 - DNA, 4488 bp, Artificial Sequence
  Fusion protein
  CDS (1)..(4488)
atgaacatccccgctctggtggaaaaccagaagaagtactttggcacctacagcgtgatggccatgctgaacgctcagaccgtgctggaccacatccagaaggtggccgatattgagggcgagcagaacgagaacaacgagaatctgtggtttcaccccgtgatgagccacctgtacaacgccaagaacggctacgacaagcagcccgagaaaaccatgttcatcatcgagcggctgcagagctacttcccattcctgaagatcatggccgagaaccagagagagtacagcaacggcaagtacaagcagaaccgcgtggaagtgaacagcaacgacatcttcgaggtgctgaagcgcgccttcggcgtgctgaagatgtacagggacctgaccaacgcatacaagacctacgaggaaaagctgaacgacggctgcgagttcctgaccagcacagagcaacctctgagcggcatgatcaacaactactacacagtggccctgcggaacatgaacgagagatacggctacaagacagaggacctggccttcatccaggacaagcggttcaagttcgtgaaggacgcctacggcaagaaaaagtcccaagtgaataccggattcttcctgagcctgcaggactacaacggcgacacacagaagaagctgcacctgagcggagtgggaatcgccctgctgatctgcctgttcctggacaagcagtacatcaacatctttctgagcaggctgcccatcttctccagctacaatgcccagagcgaggaacggcggatcatcatcagatccttcggcatcaacagcatcaagctgcccaaggaccggatccacagcgagaagtccaacaagagcgtggccatggatatgctcaacgaagtgaagcggtgccccgacgagctgttcacaacactgtctgccgagaagcagtcccggttcagaatcatcagcgacgaccacaatgaagtgctgatgaagcggagcagcgacagattcgtgcctctgctgctgcagtatatcgattacggcaagctgttcgaccacatcaggttccacgtgaacatgggcaagctgagatacctgctgaaggccgacaagacctgcatcgacggccagaccagagtcagagtgatcgagcagcccctgaacggcttcggcagactggaagaggccgagacaatgcggaagcaagagaacggcaccttcggcaacagcggcatccggatcagagacttcgagaacatgaagcgggacgacgccaatcctgccaactatccctacatcgtggacacctacacacactacatcctggaaaacaacaaggtcgagatgtttatcaacgacaaagaggacagcgccccactgctgcccgtgatcgaggatgatagatacgtggtcaagacaatccccagctgccggatgagcaccctggaaattccagccatggccttccacatgtttctgttcggcagcaagaaaaccgagaagctgatcgtggacgtgcacaaccggtacaagagactgttccaggccatgcagaaagaagaagtgaccgccgagaatatcgccagcttcggaatcgccgagagcgacctgcctcagaagatcctggatctgatcagcggcaatgcccacggcaaggatgtggacgccttcatcagactgaccgtggacgacatgctgaccgacaccgagcggagaatcaagagattcaaggacgaccggaagtccattcggagcgccgacaacaagatgggaaagagaggcttcaagcagatctccacaggcaagctggccgacttcctggccaaggacatcgtgctgtttcagcccagcgtgaacgatggcgagaacaagatcaccggcctgaactaccggatcatgcagagcgccattgccgtgtacgatagcggcgacgattacgaggccaagcagcagttcaagctgatgttcgagaaggcccggctgatcggcaagggcacaacagagcctcatccatttctgtacaaggtgttcgcccgcagcatccccgccaatgccgtcgagttctacgagcgctacctgatcgagcggaagttctacctgaccggcctgtccaacgagatcaagaaaggcaacagagtggatgtgcccttcatccggcgggaccagaacaagtggaaaacacccgccatgaagaccctgggcagaatctacagcgaggatctgcccgtggaactgcccagacagatgttcgacaatgagatcaagtcccacctgaagtccctgccacagatggaaggcatcgacttcaacaatgccaacgtgacctatctgatcgccgagtacatgaagagagtgctggacgacgacttccagaccttctaccagtggaaccgcaactaccggtacatggacatgcttaagggcgagtacgacagaaagggctccctgcagcactgcttcaccagcgtggaagagagagaaggcctctggaaagagcgggcctccagaacagagcggtacagaaagcaggccagcaacaagatccgcagcaaccggcagatgagaaacgccagcagcgaagagatcgagacaatcctggataagcggctgagcaacagccggaacgagtaccagaaaagcgagaaagtgatccggcgctacagagtgcaggatgccctgctgtttctgctggccaaaaagaccctgaccgaactggccgatttcgacggcgagaggttcaaactgaaagaaatcatgcccgacgccgagaagggaatcctgagcgagatcatgcccatgagcttcaccttcgagaaaggcggcaagaagtacaccatcaccagcgagggcatgaagctgaagaactacggcgacttctttgtgctggctagcgacaagaggatcggcaacctgctggaactcgtgggcagcgacatcgtgtccaaagaggatatcatggaagagttcaacaaatacgaccagtgcaggcccgagatcagctccatcgtgttcaacctggaaaagtgggccttcgacacataccccgagctgtctgccagagtggaccgggaagagaaggtggacttcaagagcatcctgaaaatcctgctgaacaacaagaacatcaacaaagagcagagcgacatcctgcggaagatccggaacgccttcgatgcaaacaattaccccgacaaaggcgtggtggaaatcaaggccctgcctgagatcgccatgagcatcaagaaggcctttggggagtacgccatcatgaagggaagcctgcagctgcctccacttgaaagactgacactgggatccggaggaggtggaagccagctgcatttaccgcaggttttagctgacgctgtctcacgcctggtcctgggtaagtttggtgacctgaccgacaacttctcctcccctcacgctcgcagaaaagtgctggctggagtcgtcatgacaacaggcacagatgttaaagatgccaaggtgataagtgtttctacaggaggcaaatgtattaatggtgaatacatgagtgatcgtggccttgcattaaatgactgccatgcagaaataatatctcggagatccttgctcagatttctttatacacaacttgagctttacttaaataacaaagatgatcaaaaaagatccatctttcagaaatcagagcgaggggggtttaggctgaaggagaatgtccagtttcatctgtacatcagcacctctccctgtggagatgccagaatcttctcaccacatgagccaatcctggaagaaccagcagatagacacccaaatcgtaaagcaagaggacagctacggaccaaaatagagtctggtcaggggacgattccagtgcgctccaatgcgagcatccaaacgtgggacggggtgctgcaaggggagcggctgctcaccatgtcctgcagtgacaagattgcacgctggaacgtggtgggcatccagggatcactgctcagcattttcgtggagcccatttacttctcgagcatcatcctgggcagcctttaccacggggaccacctttccagggccatgtaccagcggatctccaacatagaggacctgccacctctctacaccctcaacaagcctttgctcagtggcatcagcaatgcagaagcacggcagccagggaaggcccccaacttcagtgtcaactggacggtaggcgactccgctattgaggtcatcaacgccacgactgggaaggatgagctgggccgcgcgtcccgcctgtgtaagcacgcgttgtactgtcgctggatgcgtgtgcacggcaaggttccctcccacttactacgctccaagattaccaagcccaacgtgtaccatgagtccaagctggcggcaaaggagtaccaggccgccaaggcgcgtctgttcacagccttcatcaaggcggggctgggggcctgggtggagaagtccaccgagcaggaccagttctcactcacgtaa

SEQ ID NO: 30 - protein, 1495 aa, Artificial Sequence
  Synthetic Construct
MNIPALVENQKKYFGTYSVMAMLNAQTVLDHIQKVADIEGEQNENNENLWFHPVMSHLYNAKNGYDKQPEKTMFIIERLQSYFPFLKIMAENQREYSNGKYKQNRVEVNSNDIFEVLKRAFGVLKMYRDLTNAYKTYEEKLNDGCEFLTSTEQPLSGMINNYYTVALRNMNERYGYKTEDLAFIQDKRFKFVKDAYGKKKSQVNTGFFLSLQDYNGDTQKKLHLSGVGIALLICLFLDKQYINIFLSRLPIFSSYNAQSEERRIIIRSFGINSIKLPKDRIHSEKSNKSVAMDMLNEVKRCPDELFTTLSAEKQSRFRIISDDHNEVLMKRSSDRFVPLLLQYIDYGKLFDHIRFHVNMGKLRYLLKADKTCIDGQTRVRVIEQPLNGFGRLEEAETMRKQENGTFGNSGIRIRDFENMKRDDANPANYPYIVDTYTHYILENNKVEMFINDKEDSAPLLPVIEDDRYVVKTIPSCRMSTLEIPAMAFHMFLFGSKKTEKLIVDVHNRYKRLFQAMQKEEVTAENIASFGIAESDLPQKILDLISGNAHGKDVDAFIRLTVDDMLTDTERRIKRFKDDRKSIRSADNKMGKRGFKQISTGKLADFLAKDIVLFQPSVNDGENKITGLNYRIMQSAIAVYDSGDDYEAKQQFKLMFEKARLIGKGTTEPHPFLYKVFARSIPANAVEFYERYLIERKFYLTGLSNEIKKGNRVDVPFIRRDQNKWKTPAMKTLGRIYSEDLPVELPRQMFDNEIKSHLKSLPQMEGIDFNNANVTYLIAEYMKRVLDDDFQTFYQWNRNYRYMDMLKGEYDRKGSLQHCFTSVEEREGLWKERASRTERYRKQASNKIRSNRQMRNASSEEIETILDKRLSNSRNEYQKSEKVIRRYRVQDALLFLLAKKTLTELADFDGERFKLKEIMPDAEKGILSEIMPMSFTFEKGGKKYTITSEGMKLKNYGDFFVLASDKRIGNLLELVGSDIVSKEDIMEEFNKYDQCRPEISSIVFNLEKWAFDTYPELSARVDREEKVDFKSILKILLNNKNINKEQSDILRKIRNAFDANNYPDKGVVEIKALPEIAMSIKKAFGEYAIMKGSLQLPPLERLTLGSGGGGSQLHLPQVLADAVSRLVLGKFGDLTDNFSSPHARRKVLAGVVMTTGTDVKDAKVISVSTGGKCINGEYMSDRGLALNDCHAEIISRRSLLRFLYTQLELYLNNKDDQKRSIFQKSERGGFRLKENVQFHLYISTSPCGDARIFSPHEPILEEPADRHPNRKARGQLRTKIESGQGTIPVRSNASIQTWDGVLQGERLLTMSCSDKIARWNVVGIQGSLLSIFVEPIYFSSIILGSLYHGDHLSRAMYQRISNIEDLPPLYTLNKPLLSGISNAEARQPGKAPNFSVNWTVGDSAIEVINATTGKDELGRASRLCKHALYCRWMRVHGKVPSHLLRSKITKPNVYHESKLAAKEYQAAKARLFTAFIKAGLGAWVEKSTEQDQFSLT

SEQ ID NO: 31 - DNA, 5328 bp, Artificial Sequence
  Modified deaminase
  CDS (1)..(5328)
atgtccgaagtcgagttttcccatgagtactggatgagacacgcattgactctcgcaaagagggcttgggatgaacgcgaggtgcccgtgggggcagtactcgtgcataacaatcgcgtaatcggcgaaggttggaataggccgatcggacgccacgaccccactgcacatgcggaaatcatggcccttcgacagggagggcttgtgatgcagaattatcgacttatcgatgcgacgctgtacgtcacgcttgaaccttgcgtaatgtgcgcgggagctatgattcactcccgcattggacgagttgtattcggtgcccgcgacgccaagacgggtgccgcaggttcactgatggacgtgctgcatcacccaggcatgaaccaccgggtagaaatcacagaaggcatattggcggacgaatgtgcggcgctgttgtccgacttttttcgcatgcggaggcaggagatcaaggcccagaaaaaagcacaatcctctactgactctggtggttcttctggtggttctagcggcagcgagactcccgggacctcagagtccgccacacccgaaagttctggtggttcttctggtggttcttccgaagtcgagttttcccatgagtactggatgagacacgcattgactctcgcaaagagggcttgggatgaacgcgaggtgcccgtgggggcagtactcgtgctcaacaatcgcgtaatcggcgaaggttggaataggtcaatcggactccacgaccccactgcacatgcggaaatcatggcccttcgacagggagggcttgtgatgcagaattatcgacttatcgatgcgacgctgtacgtcacgtttgaaccttgcgtaatgtgcgcgggagctatgattcactcccgcattggacgagttgtattcggtgttcgcaacgccaagacgggtgccgcaggttcactgatggacgtgctgcattacccaggcatgaaccaccgggtagaaatcacagaaggcatattggcggacgaatgtgcggcgctgttgtgttacttttttcgcatgcggaggcaggtctttaacgcccagaaaaaagcacaatcctctactgactctggtggttcttctggtggttctagcggcagcgagactcccgggacctcagagtccgccacacccgaaagttctggtggttcttctggtggttctgataaaaagtattctattggtttagccatcggcactaattccgttggatgggctgtcataaccgatgaatacaaagtaccttcaaagaaatttaaggtgttggggaacacagaccgtcattcgattaaaaagaatcttatcggtgccctcctattcgatagtggcgaaacggcagaggcgactcgcctgaaacgaaccgctcggagaaggtatacacgtcgcaagaaccgaatatgttacttacaagaaatttttagcaatgagatggccaaagttgacgattctttctttcaccgtttggaagagtccttccttgtcgaagaggacaagaaacatgaacggcaccccatctttggaaacatagtagatgaggtggcatatcatgaaaagtacccaacgatttatcacctcagaaaaaagctagttgactcaactgataaagcggacctgaggttaatctacttggctcttgcccatatgataaagttccgtgggcactttctcattgagggtgatctaaatccggacaactcggatgtcgacaaactgttcatccagttagtacaaacctataatcagttgtttgaagagaaccctataaatgcaagtggcgtggatgcgaaggctattcttagcgcccgcctctctaaatcccgacggctagaaaacctgatcgcacaattacccggagagaagaaaaatgggttgttcggtaaccttatagcgctctcactaggcctgacaccaaattttaagtcgaacttcgacttagctgaagatgccaaattgcagcttagtaaggacacgtacgatgacgatctcgacaatctactggcacaaattggagatcagtatgcggacttatttttggctgccaaaaaccttagcgatgcaatcctcctatctgacatactgagagttaatactgagattaccaaggcgccgttatccgcttcaatgatcaaaaggtacgatgaacatcaccaagacttgacacttctcaaggccctagtccgtcagcaactgcctgagaaatataaggaaatattctttgatcagtcgaaaaacgggtacgcaggttatattgacggcggagcgagtcaagaggaattctacaagtttatcaaacccatattagagaagatggatgggacggaagagttgcttgtaaaactcaatcgcgaagatctactgcgaaagcagcggactttcgacaacggtagcattccacatcaaatccacttaggcgaattgcatgctatacttagaaggcaggaggatttttatccgttcctcaaagacaatcgtgaaaagattgagaaaatcctaacctttcgcataccttactatgtgggacccctggcccgagggaactctcggttcgcatggatgacaagaaagtccgaagaaacgattactccatggaattttgaggaagttgtcgataaaggtgcgtcagctcaatcgttcatcgagaggatgaccaactttgacaagaatttaccgaacgaaaaagtattgcctaagcacagtttactttacgagtatttcacagtgtacaatgaactcacgaaagttaagtatgtcactgagggcatgcgtaaacccgcctttctaagcggagaacagaagaaagcaatagtagatctgttattcaagaccaaccgcaaagtgacagttaagcaattgaaagaggactactttaagaaaattgaatgcttcgattctgtcgagatctccggggtagaagatcgatttaatgcgtcacttggtacgtatcatgacctcctaaagataattaaagataaggacttcctggataacgaagagaatgaagatatcttagaagatatagtgttgactcttaccctctttgaagatcgggaaatgattgaggaaagactaaaaacatacgctcacctgttcgacgataaggttatgaaacagttaaagaggcgtcgctatacgggctggggacgattgtcgcggaaacttatcaacgggataagagacaagcaaagtggtaaaactattctcgattttctaaagagcgacggcttcgccaataggaactttatgcagctgatccatgatgactctttaaccttcaaagaggatatacaaaaggcacaggtttccggacaaggggactcattgcacgaacatattgcgaatcttgctggttcgccagccatcaaaaagggcatactccagacagtcaaagtagtggatgagctagttaaggtcatgggacgtcacaaaccggaaaacattgtaatcgagatggcacgcgaaaatcaaacgactcagaaggggcaaaaaaacagtcgagagcggatgaagagaatagaagagggtattaaagaactgggcagccagatcttaaaggagcatcctgtggaaaatacccaattgcagaacgagaaactttacctctattacctacaaaatggaagggacatgtatgttgatcaggaactggacataaaccgtttatctgattacgacgtcgatcacattgtaccccaatcctttttgaaggacgattcaatcgacaataaagtgcttacacgctcggataagaaccgagggaaaagtgacaatgttccaagcgaggaagtcgtaaagaaaatgaagaactattggcggcagctcctaaatgcgaaactgataacgcaaagaaagttcgataacttaactaaagctgagaggggtggcttgtctgaacttgacaaggccggatttattaaacgtcagctcgtggaaacccgccaaatcacaaagcatgttgcacagatactagattcccgaatgaatacgaaatacgacgagaacgataagctgattcgggaagtcaaagtaatcactttaaagtcaaaattggtgtcggacttcagaaaggattttcaattctataaagttagggagataaataactaccaccatgcgcacgacgcttatcttaatgccgtcgtagggaccgcactcattaagaaatacccgaagctagaaagtgagtttgtgtatggtgattacaaagtttatgacgtccgtaagatgatcgcgaaaagcgaacaggagataggcaaggctacagccaaatacttcttttattctaacattatgaatttctttaagacggaaatcactctggcaaacggagagatacgcaaacgacctttaattgaaaccaatggggagacaggtgaaatcgtatgggataagggccgggacttcgcgacggtgagaaaagttttgtccatgccccaagtcaacatagtaaagaaaactgaggtgcagaccggagggttttcaaaggaatcgattcttccaaaaaggaatagtgataagctcatcgctcgtaaaaaggactgggacccgaaaaagtacggtggcttcgatagccctacagttgcctattctgtcctagtagtggcaaaagttgagaagggaaaatccaagaaactgaagtcagtcaaagaattattggggataacgattatggagcgctcgtcttttgaaaagaaccccatcgacttccttgaggcgaaaggttacaaggaagtaaaaaaggatctcataattaaactaccaaagtatagtctgtttgagttagaaaatggccgaaaacggatgttggctagcgccggagagcttcaaaaggggaacgaactcgcactaccgtctaaatacgtgaatttcctgtatttagcgtcccattacgagaagttgaaaggttcacctgaagataacgaacagaagcaactttttgttgagcagcacaaacattatctcgacgaaatcatagagcaaatttcggaattcagtaagagagtcatcctagctgatgccaatctggacaaagtattaagcgcatacaacaagcacagggataaacccatacgtgagcaggcggaaaatattatccatttgtttactcttaccaacctcggcgctccagccgcattcaagtattttgacacaacgatagatcgcaaacgatacacttctaccaaggaggtgctagacgcgacactgattcaccaatccatcacgggattatatgaaactcggatagatttgtcacagcttgggggtgactctggtggttctcccaagaagaagaggaaagtctaa

SEQ ID NO: 32 - protein, 1775 aa, Artificial Sequence
  Synthetic Construct
MSEVEFSHEYWMRHALTLAKRAWDEREVPVGAVLVHNNRVIGEGWNRPIGRHDPTAHAEIMALRQGGLVMQNYRLIDATLYVTLEPCVMCAGAMIHSRIGRVVFGARDAKTGAAGSLMDVLHHPGMNHRVEITEGILADECAALLSDFFRMRRQEIKAQKKAQSSTDSGGSSGGSSGSETPGTSESATPESSGGSSGGSSEVEFSHEYWMRHALTLAKRAWDEREVPVGAVLVLNNRVIGEGWNRSIGLHDPTAHAEIMALRQGGLVMQNYRLIDATLYVTFEPCVMCAGAMIHSRIGRVVFGVRNAKTGAAGSLMDVLHYPGMNHRVEITEGILADECAALLCYFFRMRRQVFNAQKKAQSSTDSGGSSGGSSGSETPGTSESATPESSGGSSGGSDKKYSIGLAIGTNSVGWAVITDEYKVPSKKFKVLGNTDRHSIKKNLIGALLFDSGETAEATRLKRTARRRYTRRKNRICYLQEIFSNEMAKVDDSFFHRLEESFLVEEDKKHERHPIFGNIVDEVAYHEKYPTIYHLRKKLVDSTDKADLRLIYLALAHMIKFRGHFLIEGDLNPDNSDVDKLFIQLVQTYNQLFEENPINASGVDAKAILSARLSKSRRLENLIAQLPGEKKNGLFGNLIALSLGLTPNFKSNFDLAEDAKLQLSKDTYDDDLDNLLAQIGDQYADLFLAAKNLSDAILLSDILRVNTEITKAPLSASMIKRYDEHHQDLTLLKALVRQQLPEKYKEIFFDQSKNGYAGYIDGGASQEEFYKFIKPILEKMDGTEELLVKLNREDLLRKQRTFDNGSIPHQIHLGELHAILRRQEDFYPFLKDNREKIEKILTFRIPYYVGPLARGNSRFAWMTRKSEETITPWNFEEVVDKGASAQSFIERMTNFDKNLPNEKVLPKHSLLYEYFTVYNELTKVKYVTEGMRKPAFLSGEQKKAIVDLLFKTNRKVTVKQLKEDYFKKIECFDSVEISGVEDRFNASLGTYHDLLKIIKDKDFLDNEENEDILEDIVLTLTLFEDREMIEERLKTYAHLFDDKVMKQLKRRRYTGWGRLSRKLINGIRDKQSGKTILDFLKSDGFANRNFMQLIHDDSLTFKEDIQKAQVSGQGDSLHEHIANLAGSPAIKKGILQTVKVVDELVKVMGRHKPENIVIEMARENQTTQKGQKNSRERMKRIEEGIKELGSQILKEHPVENTQLQNEKLYLYYLQNGRDMYVDQELDINRLSDYDVDHIVPQSFLKDDSIDNKVLTRSDKNRGKSDNVPSEEVVKKMKNYWRQLLNAKLITQRKFDNLTKAERGGLSELDKAGFIKRQLVETRQITKHVAQILDSRMNTKYDENDKLIREVKVITLKSKLVSDFRKDFQFYKVREINNYHHAHDAYLNAVVGTALIKKYPKLESEFVYGDYKVYDVRKMIAKSEQEIGKATAKYFFYSNIMNFFKTEITLANGEIRKRPLIETNGETGEIVWDKGRDFATVRKVLSMPQVNIVKKTEVQTGGFSKESILPKRNSDKLIARKKDWDPKKYGGFDSPTVAYSVLVVAKVEKGKSKKLKSVKELLGITIMERSSFEKNPIDFLEAKGYKEVKKDLIIKLPKYSLFELENGRKRMLASAGELQKGNELALPSKYVNFLYLASHYEKLKGSPEDNEQKQLFVEQHKHYLDEIIEQISEFSKRVILADANLDKVLSAYNKHRDKPIREQAENIIHLFTLTNLGAPAAFKYFDTTIDRKRYTSTKEVLDATLIHQSITGLYETRIDLSQLGGDSGGSPKKKRKV

SEQ ID NO: 33 - DNA, 5328 bp, Artificial Sequence
  Modified deaminase
  CDS (1)..(5328)
atgtccgaagtcgagttttcccatgagtactggatgagacacgcattgactctcgcaaagagggcttgggatgaacgcgaggtgcccgtgggggcagtactcgtgcataacaatcgcgtaatcggcgaaggttggaataggccgatcggacgccacgaccccactgcacatgcggaaatcatggcccttcgacagggagggcttgtgatgcagaattatcgacttatcgatgcgacgctgtacgtcacgcttgaaccttgcgtaatgtgcgcgggagctatgattcactcccgcattggacgagttgtattcggtgcccgcgacgccaagacgggtgccgcaggttcactgatggacgtgctgcatcacccaggcatgaaccaccgggtagaaatcacagaaggcatattggcggacgaatgtgcggcgctgttgtccgacttttttcgcatgcggaggcaggagatcaaggcccagaaaaaagcacaatcctctactgactctggtggttcttctggtggttctagcggcagcgagactcccgggacctcagagtccgccacacccgaaagttctggtggttcttctggtggttcttccgaagtcgagttttcccatgagtactggatgagacacgcattgactctcgcaaagagggctctcgatgaacgcgaggtgcccgtgggggcagtactcgtgctcaacaatcgcgtaatcggcgaaggttggaatagggcaatcggactccacgaccccactgcacatgcggaaatcatggcccttcgacagggagggcttgtgatgcagaattatcgacttatcgatgcgacgctgtacgtcacgtttgaaccttgcgtaatgtgcgcgggagctatgattcactcccgcattggacgagttgtattcggtgttcgcaacgccaagacgggtgccgcaggttcactgatggacgtgctgcattacccaggcatgaaccaccgggtagaaatcacagaaggcatattggcggacgaatgtaacgcgctgttgtgttacttttttcgcatgcggaggcaggtctttaacgcccagaaaaaagcacaatcctctactgactctggtggttcttctggtggttctagcggcagcgagactcccgggacctcagagtccgccacacccgaaagttctggtggttcttctggtggttctgataaaaagtattctattggtttagccatcggcactaattccgttggatgggctgtcataaccgatgaatacaaagtaccttcaaagaaatttaaggtgttggggaacacagaccgtcattcgattaaaaagaatcttatcggtgccctcctattcgatagtggcgaaacggcagaggcgactcgcctgaaacgaaccgctcggagaaggtatacacgtcgcaagaaccgaatatgttacttacaagaaatttttagcaatgagatggccaaagttgacgattctttctttcaccgtttggaagagtccttccttgtcgaagaggacaagaaacatgaacggcaccccatctttggaaacatagtagatgaggtggcatatcatgaaaagtacccaacgatttatcacctcagaaaaaagctagttgactcaactgataaagcggacctgaggttaatctacttggctcttgcccatatgataaagttccgtgggcactttctcattgagggtgatctaaatccggacaactcggatgtcgacaaactgttcatccagttagtacaaacctataatcagttgtttgaagagaaccctataaatgcaagtggcgtggatgcgaaggctattcttagcgcccgcctctctaaatcccgacggctagaaaacctgatcgcacaattacccggagagaagaaaaatgggttgttcggtaaccttatagcgctctcactaggcctgacaccaaattttaagtcgaacttcgacttagctgaagatgccaaattgcagcttagtaaggacacgtacgatgacgatctcgacaatctactggcacaaattggagatcagtatgcggacttatttttggctgccaaaaaccttagcgatgcaatcctcctatctgacatactgagagttaatactgagattaccaaggcgccgttatccgcttcaatgatcaaaaggtacgatgaacatcaccaagacttgacacttctcaaggccctagtccgtcagcaactgcctgagaaatataaggaaatattctttgatcagtcgaaaaacgggtacgcaggttatattgacggcggagcgagtcaagaggaattctacaagtttatcaaacccatattagagaagatggatgggacggaagagttgcttgtaaaactcaatcgcgaagatctactgcgaaagcagcggactttcgacaacggtagcattccacatcaaatccacttaggcgaattgcatgctatacttagaaggcaggaggatttttatccgttcctcaaagacaatcgtgaaaagattgagaaaatcctaacctttcgcataccttactatgtgggacccctggcccgagggaactctcggttcgcatggatgacaagaaagtccgaagaaacgattactccatggaattttgaggaagttgtcgataaaggtgcgtcagctcaatcgttcatcgagaggatgaccaactttgacaagaatttaccgaacgaaaaagtattgcctaagcacagtttactttacgagtatttcacagtgtacaatgaactcacgaaagttaagtatgtcactgagggcatgcgtaaacccgcctttctaagcggagaacagaagaaagcaatagtagatctgttattcaagaccaaccgcaaagtgacagttaagcaattgaaagaggactactttaagaaaattgaatgcttcgattctgtcgagatctccggggtagaagatcgatttaatgcgtcacttggtacgtatcatgacctcctaaagataattaaagataaggacttcctggataacgaagagaatgaagatatcttagaagatatagtgttgactcttaccctctttgaagatcgggaaatgattgaggaaagactaaaaacatacgctcacctgttcgacgataaggttatgaaacagttaaagaggcgtcgctatacgggctggggacgattgtcgcggaaacttatcaacgggataagagacaagcaaagtggtaaaactattctcgattttctaaagagcgacggcttcgccaataggaactttatgcagctgatccatgatgactctttaaccttcaaagaggatatacaaaaggcacaggtttccggacaaggggactcattgcacgaacatattgcgaatcttgctggttcgccagccatcaaaaagggcatactccagacagtcaaagtagtggatgagctagttaaggtcatgggacgtcacaaaccggaaaacattgtaatcgagatggcacgcgaaaatcaaacgactcagaaggggcaaaaaaacagtcgagagcggatgaagagaatagaagagggtattaaagaactgggcagccagatcttaaaggagcatcctgtggaaaatacccaattgcagaacgagaaactttacctctattacctacaaaatggaagggacatgtatgttgatcaggaactggacataaaccgtttatctgattacgacgtcgatcacattgtaccccaatcctttttgaaggacgattcaatcgacaataaagtgcttacacgctcggataagaaccgagggaaaagtgacaatgttccaagcgaggaagtcgtaaagaaaatgaagaactattggcggcagctcctaaatgcgaaactgataacgcaaagaaagttcgataacttaactaaagctgagaggggtggcttgtctgaacttgacaaggccggatttattaaacgtcagctcgtggaaacccgccaaatcacaaagcatgttgcacagatactagattcccgaatgaatacgaaatacgacgagaacgataagctgattcgggaagtcaaagtaatcactttaaagtcaaaattggtgtcggacttcagaaaggattttcaattctataaagttagggagataaataactaccaccatgcgcacgacgcttatcttaatgccgtcgtagggaccgcactcattaagaaatacccgaagctagaaagtgagtttgtgtatggtgattacaaagtttatgacgtccgtaagatgatcgcgaaaagcgaacaggagataggcaaggctacagccaaatacttcttttattctaacattatgaatttctttaagacggaaatcactctggcaaacggagagatacgcaaacgacctttaattgaaaccaatggggagacaggtgaaatcgtatgggataagggccgggacttcgcgacggtgagaaaagttttgtccatgccccaagtcaacatagtaaagaaaactgaggtgcagaccggagggttttcaaaggaatcgattcttccaaaaaggaatagtgataagctcatcgctcgtaaaaaggactgggacccgaaaaagtacggtggcttcgatagccctacagttgcctattctgtcctagtagtggcaaaagttgagaagggaaaatccaagaaactgaagtcagtcaaagaattattggggataacgattatggagcgctcgtcttttgaaaagaaccccatcgacttccttgaggcgaaaggttacaaggaagtaaaaaaggatctcataattaaactaccaaagtatagtctgtttgagttagaaaatggccgaaaacggatgttggctagcgccggagagcttcaaaaggggaacgaactcgcactaccgtctaaatacgtgaatttcctgtatttagcgtcccattacgagaagttgaaaggttcacctgaagataacgaacagaagcaactttttgttgagcagcacaaacattatctcgacgaaatcatagagcaaatttcggaattcagtaagagagtcatcctagctgatgccaatctggacaaagtattaagcgcatacaacaagcacagggataaacccatacgtgagcaggcggaaaatattatccatttgtttactcttaccaacctcggcgctccagccgcattcaagtattttgacacaacgatagatcgcaaacgatacacttctaccaaggaggtgctagacgcgacactgattcaccaatccatcacgggattatatgaaactcggatagatttgtcacagcttgggggtgactctggtggttctcccaagaagaagaggaaagtctaa

SEQ ID NO: 34 - protein, 1775 aa, Artificial Sequence
  Synthetic Construct
MSEVEFSHEYWMRHALTLAKRAWDEREVPVGAVLVHNNRVIGEGWNRPIGRHDPTAHAEIMALRQGGLVMQNYRLIDATLYVTLEPCVMCAGAMIHSRIGRVVFGARDAKTGAAGSLMDVLHHPGMNHRVEITEGILADECAALLSDFFRMRRQEIKAQKKAQSSTDSGGSSGGSSGSETPGTSESATPESSGGSSGGSSEVEFSHEYWMRHALTLAKRALDEREVPVGAVLVLNNRVIGEGWNRAIGLHDPTAHAEIMALRQGGLVMQNYRLIDATLYVTFEPCVMCAGAMIHSRIGRVVFGVRNAKTGAAGSLMDVLHYPGMNHRVEITEGILADECNALLCYFFRMRRQVFNAQKKAQSSTDSGGSSGGSSGSETPGTSESATPESSGGSSGGSDKKYSIGLAIGTNSVGWAVITDEYKVPSKKFKVLGNTDRHSIKKNLIGALLFDSGETAEATRLKRTARRRYTRRKNRICYLQEIFSNEMAKVDDSFFHRLEESFLVEEDKKHERHPIFGNIVDEVAYHEKYPTIYHLRKKLVDSTDKADLRLIYLALAHMIKFRGHFLIEGDLNPDNSDVDKLFIQLVQTYNQLFEENPINASGVDAKAILSARLSKSRRLENLIAQLPGEKKNGLFGNLIALSLGLTPNFKSNFDLAEDAKLQLSKDTYDDDLDNLLAQIGDQYADLFLAAKNLSDAILLSDILRVNTEITKAPLSASMIKRYDEHHQDLTLLKALVRQQLPEKYKEIFFDQSKNGYAGYIDGGASQEEFYKFIKPILEKMDGTEELLVKLNREDLLRKQRTFDNGSIPHQIHLGELHAILRRQEDFYPFLKDNREKIEKILTFRIPYYVGPLARGNSRFAWMTRKSEETITPWNFEEVVDKGASAQSFIERMTNFDKNLPNEKVLPKHSLLYEYFTVYNELTKVKYVTEGMRKPAFLSGEQKKAIVDLLFKTNRKVTVKQLKEDYFKKIECFDSVEISGVEDRFNASLGTYHDLLKIIKDKDFLDNEENEDILEDIVLTLTLFEDREMIEERLKTYAHLFDDKVMKQLKRRRYTGWGRLSRKLINGIRDKQSGKTILDFLKSDGFANRNFMQLIHDDSLTFKEDIQKAQVSGQGDSLHEHIANLAGSPAIKKGILQTVKVVDELVKVMGRHKPENIVIEMARENQTTQKGQKNSRERMKRIEEGIKELGSQILKEHPVENTQLQNEKLYLYYLQNGRDMYVDQELDINRLSDYDVDHIVPQSFLKDDSIDNKVLTRSDKNRGKSDNVPSEEVVKKMKNYWRQLLNAKLITQRKFDNLTKAERGGLSELDKAGFIKRQLVETRQITKHVAQILDSRMNTKYDENDKLIREVKVITLKSKLVSDFRKDFQFYKVREINNYHHAHDAYLNAVVGTALIKKYPKLESEFVYGDYKVYDVRKMIAKSEQEIGKATAKYFFYSNIMNFFKTEITLANGEIRKRPLIETNGETGEIVWDKGRDFATVRKVLSMPQVNIVKKTEVQTGGFSKESILPKRNSDKLIARKKDWDPKKYGGFDSPTVAYSVLVVAKVEKGKSKKLKSVKELLGITIMERSSFEKNPIDFLEAKGYKEVKKDLIIKLPKYSLFELENGRKRMLASAGELQKGNELALPSKYVNFLYLASHYEKLKGSPEDNEQKQLFVEQHKHYLDEIIEQISEFSKRVILADANLDKVLSAYNKHRDKPIREQAENIIHLFTLTNLGAPAAFKYFDTTIDRKRYTSTKEVLDATLIHQSITGLYETRIDLSQLGGDSGGSPKKKRKV

SEQ ID NO: 35 - DNA, 5328 bp, Artificial Sequence
  Modified deaminase
  CDS (1)..(5328)
atgtccgaagtcgagttttcccatgagtactggatgagacacgcattgactctcgcaaagagggcttgggatgaacgcgaggtgcccgtgggggcagtactcgtgcataacaatcgcgtaatcggcgaaggttggaataggccgatcggacgccacgaccccactgcacatgcggaaatcatggcccttcgacagggagggcttgtgatgcagaattatcgacttatcgatgcgacgctgtacgtcacgcttgaaccttgcgtaatgtgcgcgggagctatgattcactcccgcattggacgagttgtattcggtgcccgcgacgccaagacgggtgccgcaggttcactgatggacgtgctgcatcacccaggcatgaaccaccgggtagaaatcacagaaggcatattggcggacgaatgtgcggcgctgttgtccgacttttttcgcatgcggaggcaggagatcaaggcccagaaaaaagcacaatcctctactgactctggtggttcttctggtggttctagcggcagcgagactcccgggacctcagagtccgccacacccgaaagttctggtggttcttctggtggttcttccgaagtcgagttttcccatgagtactggatgagacacgcattgactctcgcaaagagggctctcgatgaacgcgaggtgcccgtgggggcagtactcgtgctcaacaatcgcgtaatcggcgaaggttggaatagggcaatcggactccacgaccccactgcacatgcggaaatcatggcccttcgacagggagggcttgtgatgcagaattatcgacttatcgatgcgacgctgtacgtcacgtttgaaccttgcgtaatgtgcgcgggagctatgattcactcccgcattggacgagttgtattcggtgttcgcaacgccaagacgggtgccgcaggttcactgatggacgtgctgcattacccaggcatgaaccaccgggtagaaatcacagaaggcatattggcggacgaatgtaacgcgctgttgtgttacttttttcgcatgcccaggcaggtctttaacgcccagaaaaaagcacaatcctctactgactctggtggttcttctggtggttctagcggcagcgagactcccgggacctcagagtccgccacacccgaaagttctggtggttcttctggtggttctgataaaaagtattctattggtttagccatcggcactaattccgttggatgggctgtcataaccgatgaatacaaagtaccttcaaagaaatttaaggtgttggggaacacagaccgtcattcgattaaaaagaatcttatcggtgccctcctattcgatagtggcgaaacggcagaggcgactcgcctgaaacgaaccgctcggagaaggtatacacgtcgcaagaaccgaatatgttacttacaagaaatttttagcaatgagatggccaaagttgacgattctttctttcaccgtttggaagagtccttccttgtcgaagaggacaagaaacatgaacggcaccccatctttggaaacatagtagatgaggtggcatatcatgaaaagtacccaacgatttatcacctcagaaaaaagctagttgactcaactgataaagcggacctgaggttaatctacttggctcttgcccatatgataaagttccgtgggcactttctcattgagggtgatctaaatccggacaactcggatgtcgacaaactgttcatccagttagtacaaacctataatcagttgtttgaagagaaccctataaatgcaagtggcgtggatgcgaaggctattcttagcgcccgcctctctaaatcccgacggctagaaaacctgatcgcacaattacccggagagaagaaaaatgggttgttcggtaaccttatagcgctctcactaggcctgacaccaaattttaagtcgaacttcgacttagctgaagatgccaaattgcagcttagtaaggacacgtacgatgacgatctcgacaatctactggcacaaattggagatcagtatgcggacttatttttggctgccaaaaaccttagcgatgcaatcctcctatctgacatactgagagttaatactgagattaccaaggcgccgttatccgcttcaatgatcaaaaggtacgatgaacatcaccaagacttgacacttctcaaggccctagtccgtcagcaactgcctgagaaatataaggaaatattctttgatcagtcgaaaaacgggtacgcaggttatattgacggcggagcgagtcaagaggaattctacaagtttatcaaacccatattagagaagatggatgggacggaagagttgcttgtaaaactcaatcgcgaagatctactgcgaaagcagcggactttcgacaacggtagcattccacatcaaatccacttaggcgaattgcatgctatacttagaaggcaggaggatttttatccgttcctcaaagacaatcgtgaaaagattgagaaaatcctaacctttcgcataccttactatgtgggacccctggcccgagggaactctcggttcgcatggatgacaagaaagtccgaagaaacgattactccatggaattttgaggaagttgtcgataaaggtgcgtcagctcaatcgttcatcgagaggatgaccaactttgacaagaatttaccgaacgaaaaagtattgcctaagcacagtttactttacgagtatttcacagtgtacaatgaactcacgaaagttaagtatgtcactgagggcatgcgtaaacccgcctttctaagcggagaacagaagaaagcaatagtagatctgttattcaagaccaaccgcaaagtgacagttaagcaattgaaagaggactactttaagaaaattgaatgcttcgattctgtcgagatctccggggtagaagatcgatttaatgcgtcacttggtacgtatcatgacctcctaaagataattaaagataaggacttcctggataacgaagagaatgaagatatcttagaagatatagtgttgactcttaccctctttgaagatcgggaaatgattgaggaaagactaaaaacatacgctcacctgttcgacgataaggttatgaaacagttaaagaggcgtcgctatacgggctggggacgattgtcgcggaaacttatcaacgggataagagacaagcaaagtggtaaaactattctcgattttctaaagagcgacggcttcgccaataggaactttatgcagctgatccatgatgactctttaaccttcaaagaggatatacaaaaggcacaggtttccggacaaggggactcattgcacgaacatattgcgaatcttgctggttcgccagccatcaaaaagggcatactccagacagtcaaagtagtggatgagctagttaaggtcatgggacgtcacaaaccggaaaacattgtaatcgagatggcacgcgaaaatcaaacgactcagaaggggcaaaaaaacagtcgagagcggatgaagagaatagaagagggtattaaagaactgggcagccagatcttaaaggagcatcctgtggaaaatacccaattgcagaacgagaaactttacctctattacctacaaaatggaagggacatgtatgttgatcaggaactggacataaaccgtttatctgattacgacgtcgatcacattgtaccccaatcctttttgaaggacgattcaatcgacaataaagtgcttacacgctcggataagaaccgagggaaaagtgacaatgttccaagcgaggaagtcgtaaagaaaatgaagaactattggcggcagctcctaaatgcgaaactgataacgcaaagaaagttcgataacttaactaaagctgagaggggtggcttgtctgaacttgacaaggccggatttattaaacgtcagctcgtggaaacccgccaaatcacaaagcatgttgcacagatactagattcccgaatgaatacgaaatacgacgagaacgataagctgattcgggaagtcaaagtaatcactttaaagtcaaaattggtgtcggacttcagaaaggattttcaattctataaagttagggagataaataactaccaccatgcgcacgacgcttatcttaatgccgtcgtagggaccgcactcattaagaaatacccgaagctagaaagtgagtttgtgtatggtgattacaaagtttatgacgtccgtaagatgatcgcgaaaagcgaacaggagataggcaaggctacagccaaatacttcttttattctaacattatgaatttctttaagacggaaatcactctggcaaacggagagatacgcaaacgacctttaattgaaaccaatggggagacaggtgaaatcgtatgggataagggccgggacttcgcgacggtgagaaaagttttgtccatgccccaagtcaacatagtaaagaaaactgaggtgcagaccggagggttttcaaaggaatcgattcttccaaaaaggaatagtgataagctcatcgctcgtaaaaaggactgggacccgaaaaagtacggtggcttcgatagccctacagttgcctattctgtcctagtagtggcaaaagttgagaagggaaaatccaagaaactgaagtcagtcaaagaattattggggataacgattatggagcgctcgtcttttgaaaagaaccccatcgacttccttgaggcgaaaggttacaaggaagtaaaaaaggatctcataattaaactaccaaagtatagtctgtttgagttagaaaatggccgaaaacggatgttggctagcgccggagagcttcaaaaggggaacgaactcgcactaccgtctaaatacgtgaatttcctgtatttagcgtcccattacgagaagttgaaaggttcacctgaagataacgaacagaagcaactttttgttgagcagcacaaacattatctcgacgaaatcatagagcaaatttcggaattcagtaagagagtcatcctagctgatgccaatctggacaaagtattaagcgcatacaacaagcacagggataaacccatacgtgagcaggcggaaaatattatccatttgtttactcttaccaacctcggcgctccagccgcattcaagtattttgacacaacgatagatcgcaaacgatacacttctaccaaggaggtgctagacgcgacactgattcaccaatccatcacgggattatatgaaactcggatagatttgtcacagcttgggggtgactctggtggttctcccaagaagaagaggaaagtctaa

SEQ ID NO: 36 - protein, 1775 aa, Artificial Sequence
  Synthetic Construct
MSEVEFSHEYWMRHALTLAKRAWDEREVPVGAVLVHNNRVIGEGWNRPIGRHDPTAHAEIMALRQGGLVMQNYRLIDATLYVTLEPCVMCAGAMIHSRIGRVVFGARDAKTGAAGSLMDVLHHPGMNHRVEITEGILADECAALLSDFFRMRRQEIKAQKKAQSSTDSGGSSGGSSGSETPGTSESATPESSGGSSGGSSEVEFSHEYWMRHALTLAKRALDEREVPVGAVLVLNNRVIGEGWNRAIGLHDPTAHAEIMALRQGGLVMQNYRLIDATLYVTFEPCVMCAGAMIHSRIGRVVFGVRNAKTGAAGSLMDVLHYPGMNHRVEITEGILADECNALLCYFFRMPRQVFNAQKKAQSSTDSGGSSGGSSGSETPGTSESATPESSGGSSGGSDKKYSIGLAIGTNSVGWAVITDEYKVPSKKFKVLGNTDRHSIKKNLIGALLFDSGETAEATRLKRTARRRYTRRKNRICYLQEIFSNEMAKVDDSFFHRLEESFLVEEDKKHERHPIFGNIVDEVAYHEKYPTIYHLRKKLVDSTDKADLRLIYLALAHMIKFRGHFLIEGDLNPDNSDVDKLFIQLVQTYNQLFEENPINASGVDAKAILSARLSKSRRLENLIAQLPGEKKNGLFGNLIALSLGLTPNFKSNFDLAEDAKLQLSKDTYDDDLDNLLAQIGDQYADLFLAAKNLSDAILLSDILRVNTEITKAPLSASMIKRYDEHHQDLTLLKALVRQQLPEKYKEIFFDQSKNGYAGYIDGGASQEEFYKFIKPILEKMDGTEELLVKLNREDLLRKQRTFDNGSIPHQIHLGELHAILRRQEDFYPFLKDNREKIEKILTFRIPYYVGPLARGNSRFAWMTRKSEETITPWNFEEVVDKGASAQSFIERMTNFDKNLPNEKVLPKHSLLYEYFTVYNELTKVKYVTEGMRKPAFLSGEQKKAIVDLLFKTNRKVTVKQLKEDYFKKIECFDSVEISGVEDRFNASLGTYHDLLKIIKDKDFLDNEENEDILEDIVLTLTLFEDREMIEERLKTYAHLFDDKVMKQLKRRRYTGWGRLSRKLINGIRDKQSGKTILDFLKSDGFANRNFMQLIHDDSLTFKEDIQKAQVSGQGDSLHEHIANLAGSPAIKKGILQTVKVVDELVKVMGRHKPENIVIEMARENQTTQKGQKNSRERMKRIEEGIKELGSQILKEHPVENTQLQNEKLYLYYLQNGRDMYVDQELDINRLSDYDVDHIVPQSFLKDDSIDNKVLTRSDKNRGKSDNVPSEEVVKKMKNYWRQLLNAKLITQRKFDNLTKAERGGLSELDKAGFIKRQLVETRQITKHVAQILDSRMNTKYDENDKLIREVKVITLKSKLVSDFRKDFQFYKVREINNYHHAHDAYLNAVVGTALIKKYPKLESEFVYGDYKVYDVRKMIAKSEQEIGKATAKYFFYSNIMNFFKTEITLANGEIRKRPLIETNGETGEIVWDKGRDFATVRKVLSMPQVNIVKKTEVQTGGFSKESILPKRNSDKLIARKKDWDPKKYGGFDSPTVAYSVLVVAKVEKGKSKKLKSVKELLGITIMERSSFEKNPIDFLEAKGYKEVKKDLIIKLPKYSLFELENGRKRMLASAGELQKGNELALPSKYVNFLYLASHYEKLKGSPEDNEQKQLFVEQHKHYLDEIIEQISEFSKRVILADANLDKVLSAYNKHRDKPIREQAENIIHLFTLTNLGAPAAFKYFDTTIDRKRYTSTKEVLDATLIHQSITGLYETRIDLSQLGGDSGGSPKKKRKV

SEQ ID NO: 37 - DNA, 5328 bp, Artificial Sequence
  Modified deaminase
  CDS (1)..(5328)
atgtccgaagtcgagttttcccatgagtactggatgagacacgcattgactctcgcaaagagggcttgggatgaacgcgaggtgcccgtgggggcagtactcgtgcataacaatcgcgtaatcggcgaaggttggaataggccgatcggacgccacgaccccactgcacatgcggaaatcatggcccttcgacagggagggcttgtgatgcagaattatcgacttatcgatgcgacgctgtacgtcacgcttgaaccttgcgtaatgtgcgcgggagctatgattcactcccgcattggacgagttgtattcggtgcccgcgacgccaagacgggtgccgcaggttcactgatggacgtgctgcatcacccaggcatgaaccaccgggtagaaatcacagaaggcatattggcggacgaatgtgcggcgctgttgtccgacttttttcgcatgcggaggcaggagatcaaggcccagaaaaaagcacaatcctctactgactctggtggttcttctggtggttctagcggcagcgagactcccgggacctcagagtccgccacacccgaaagttctggtggttcttctggtggttcttccgaagtcgagttttcccatgagtactggatgagacacgcattgactctcgcaaagagggctcgagatgaacgcgaggtgcccgtgggggcagtactcgtgctcaacaatcgcgtaatcggcgaaggttggaatagggcaatcggactccacgaccccactgcacatgcggaaatcatggcccttcgacagggagggcttgtgatgcagaattatcgacttatcgatgcgacgctgtacgtcacgtttgaaccttgcgtaatgtgcgcgggagctatgattcactcccgcattggacgagttgtattcggtgttcgcaacgccaagacgggtgccgcaggttcactgatggacgtgctgcattacccaggcatgaaccaccgggtagaaatcacagaaggcatattggcggacgaatgtgcggcgctgttgtgttacttttttcgcatgcccaggcaggtctttaacgcccagaaaaaagcacaatcctctactgactctggtggttcttctggtggttctagcggcagcgagactcccgggacctcagagtccgccacacccgaaagttctggtggttcttctggtggttctgataaaaagtattctattggtttagccatcggcactaattccgttggatgggctgtcataaccgatgaatacaaagtaccttcaaagaaatttaaggtgttggggaacacagaccgtcattcgattaaaaagaatcttatcggtgccctcctattcgatagtggcgaaacggcagaggcgactcgcctgaaacgaaccgctcggagaaggtatacacgtcgcaagaaccgaatatgttacttacaagaaatttttagcaatgagatggccaaagttgacgattctttctttcaccgtttggaagagtccttccttgtcgaagaggacaagaaacatgaacggcaccccatctttggaaacatagtagatgaggtggcatatcatgaaaagtacccaacgatttatcacctcagaaaaaagctagttgactcaactgataaagcggacctgaggttaatctacttggctcttgcccatatgataaagttccgtgggcactttctcattgagggtgatctaaatccggacaactcggatgtcgacaaactgttcatccagttagtacaaacctataatcagttgtttgaagagaaccctataaatgcaagtggcgtggatgcgaaggctattcttagcgcccgcctctctaaatcccgacggctagaaaacctgatcgcacaattacccggagagaagaaaaatgggttgttcggtaaccttatagcgctctcactaggcctgacaccaaattttaagtcgaacttcgacttagctgaagatgccaaattgcagcttagtaaggacacgtacgatgacgatctcgacaatctactggcacaaattggagatcagtatgcggacttatttttggctgccaaaaaccttagcgatgcaatcctcctatctgacatactgagagttaatactgagattaccaaggcgccgttatccgcttcaatgatcaaaaggtacgatgaacatcaccaagacttgacacttctcaaggccctagtccgtcagcaactgcctgagaaatataaggaaatattctttgatcagtcgaaaaacgggtacgcaggttatattgacggcggagcgagtcaagaggaattctacaagtttatcaaacccatattagagaagatggatgggacggaagagttgcttgtaaaactcaatcgcgaagatctactgcgaaagcagcggactttcgacaacggtagcattccacatcaaatccacttaggcgaattgcatgctatacttagaaggcaggaggatttttatccgttcctcaaagacaatcgtgaaaagattgagaaaatcctaacctttcgcataccttactatgtgggacccctggcccgagggaactctcggttcgcatggatgacaagaaagtccgaagaaacgattactccatggaattttgaggaagttgtcgataaaggtgcgtcagctcaatcgttcatcgagaggatgaccaactttgacaagaatttaccgaacgaaaaagtattgcctaagcacagtttactttacgagtatttcacagtgtacaatgaactcacgaaagttaagtatgtcactgagggcatgcgtaaacccgcctttctaagcggagaacagaagaaagcaatagtagatctgttattcaagaccaaccgcaaagtgacagttaagcaattgaaagaggactactttaagaaaattgaatgcttcgattctgtcgagatctccggggtagaagatcgatttaatgcgtcacttggtacgtatcatgacctcctaaagataattaaagataaggacttcctggataacgaagagaatgaagatatcttagaagatatagtgttgactcttaccctctttgaagatcgggaaatgattgaggaaagactaaaaacatacgctcacctgttcgacgataaggttatgaaacagttaaagaggcgtcgctatacgggctggggacgattgtcgcggaaacttatcaacgggataagagacaagcaaagtggtaaaactattctcgattttctaaagagcgacggcttcgccaataggaactttatgcagctgatccatgatgactctttaaccttcaaagaggatatacaaaaggcacaggtttccggacaaggggactcattgcacgaacatattgcgaatcttgctggttcgccagccatcaaaaagggcatactccagacagtcaaagtagtggatgagctagttaaggtcatgggacgtcacaaaccggaaaacattgtaatcgagatggcacgcgaaaatcaaacgactcagaaggggcaaaaaaacagtcgagagcggatgaagagaatagaagagggtattaaagaactgggcagccagatcttaaaggagcatcctgtggaaaatacccaattgcagaacgagaaactttacctctattacctacaaaatggaagggacatgtatgttgatcaggaactggacataaaccgtttatctgattacgacgtcgatcacattgtaccccaatcctttttgaaggacgattcaatcgacaataaagtgcttacacgctcggataagaaccgagggaaaagtgacaatgttccaagcgaggaagtcgtaaagaaaatgaagaactattggcggcagctcctaaatgcgaaactgataacgcaaagaaagttcgataacttaactaaagctgagaggggtggcttgtctgaacttgacaaggccggatttattaaacgtcagctcgtggaaacccgccaaatcacaaagcatgttgcacagatactagattcccgaatgaatacgaaatacgacgagaacgataagctgattcgggaagtcaaagtaatcactttaaagtcaaaattggtgtcggacttcagaaaggattttcaattctataaagttagggagataaataactaccaccatgcgcacgacgcttatcttaatgccgtcgtagggaccgcactcattaagaaatacccgaagctagaaagtgagtttgtgtatggtgattacaaagtttatgacgtccgtaagatgatcgcgaaaagcgaacaggagataggcaaggctacagccaaatacttcttttattctaacattatgaatttctttaagacggaaatcactctggcaaacggagagatacgcaaacgacctttaattgaaaccaatggggagacaggtgaaatcgtatgggataagggccgggacttcgcgacggtgagaaaagttttgtccatgccccaagtcaacatagtaaagaaaactgaggtgcagaccggagggttttcaaaggaatcgattcttccaaaaaggaatagtgataagctcatcgctcgtaaaaaggactgggacccgaaaaagtacggtggcttcgatagccctacagttgcctattctgtcctagtagtggcaaaagttgagaagggaaaatccaagaaactgaagtcagtcaaagaattattggggataacgattatggagcgctcgtcttttgaaaagaaccccatcgacttccttgaggcgaaaggttacaaggaagtaaaaaaggatctcataattaaactaccaaagtatagtctgtttgagttagaaaatggccgaaaacggatgttggctagcgccggagagcttcaaaaggggaacgaactcgcactaccgtctaaatacgtgaatttcctgtatttagcgtcccattacgagaagttgaaaggttcacctgaagataacgaacagaagcaactttttgttgagcagcacaaacattatctcgacgaaatcatagagcaaatttcggaattcagtaagagagtcatcctagctgatgccaatctggacaaagtattaagcgcatacaacaagcacagggataaacccatacgtgagcaggcggaaaatattatccatttgtttactcttaccaacctcggcgctccagccgcattcaagtattttgacacaacgatagatcgcaaacgatacacttctaccaaggaggtgctagacgcgacactgattcaccaatccatcacgggattatatgaaactcggatagatttgtcacagcttgggggtgactctggtggttctcccaagaagaagaggaaagtctaa

SEQ ID NO: 38 - protein, 1775 aa, Artificial Sequence
  Synthetic Construct
MSEVEFSHEYWMRHALTLAKRAWDEREVPVGAVLVHNNRVIGEGWNRPIGRHDPTAHAEIMALRQGGLVMQNYRLIDATLYVTLEPCVMCAGAMIHSRIGRVVFGARDAKTGAAGSLMDVLHHPGMNHRVEITEGILADECAALLSDFFRMRRQEIKAQKKAQSSTDSGGSSGGSSGSETPGTSESATPESSGGSSGGSSEVEFSHEYWMRHALTLAKRARDEREVPVGAVLVLNNRVIGEGWNRAIGLHDPTAHAEIMALRQGGLVMQNYRLIDATLYVTFEPCVMCAGAMIHSRIGRVVFGVRNAKTGAAGSLMDVLHYPGMNHRVEITEGILADECAALLCYFFRMPRQVFNAQKKAQSSTDSGGSSGGSSGSETPGTSESATPESSGGSSGGSDKKYSIGLAIGTNSVGWAVITDEYKVPSKKFKVLGNTDRHSIKKNLIGALLFDSGETAEATRLKRTARRRYTRRKNRICYLQEIFSNEMAKVDDSFFHRLEESFLVEEDKKHERHPIFGNIVDEVAYHEKYPTIYHLRKKLVDSTDKADLRLIYLALAHMIKFRGHFLIEGDLNPDNSDVDKLFIQLVQTYNQLFEENPINASGVDAKAILSARLSKSRRLENLIAQLPGEKKNGLFGNLIALSLGLTPNFKSNFDLAEDAKLQLSKDTYDDDLDNLLAQIGDQYADLFLAAKNLSDAILLSDILRVNTEITKAPLSASMIKRYDEHHQDLTLLKALVRQQLPEKYKEIFFDQSKNGYAGYIDGGASQEEFYKFIKPILEKMDGTEELLVKLNREDLLRKQRTFDNGSIPHQIHLGELHAILRRQEDFYPFLKDNREKIEKILTFRIPYYVGPLARGNSRFAWMTRKSEETITPWNFEEVVDKGASAQSFIERMTNFDKNLPNEKVLPKHSLLYEYFTVYNELTKVKYVTEGMRKPAFLSGEQKKAIVDLLFKTNRKVTVKQLKEDYFKKIECFDSVEISGVEDRFNASLGTYHDLLKIIKDKDFLDNEENEDILEDIVLTLTLFEDREMIEERLKTYAHLFDDKVMKQLKRRRYTGWGRLSRKLINGIRDKQSGKTILDFLKSDGFANRNFMQLIHDDSLTFKEDIQKAQVSGQGDSLHEHIANLAGSPAIKKGILQTVKVVDELVKVMGRHKPENIVIEMARENQTTQKGQKNSRERMKRIEEGIKELGSQILKEHPVENTQLQNEKLYLYYLQNGRDMYVDQELDINRLSDYDVDHIVPQSFLKDDSIDNKVLTRSDKNRGKSDNVPSEEVVKKMKNYWRQLLNAKLITQRKFDNLTKAERGGLSELDKAGFIKRQLVETRQITKHVAQILDSRMNTKYDENDKLIREVKVITLKSKLVSDFRKDFQFYKVREINNYHHAHDAYLNAVVGTALIKKYPKLESEFVYGDYKVYDVRKMIAKSEQEIGKATAKYFFYSNIMNFFKTEITLANGEIRKRPLIETNGETGEIVWDKGRDFATVRKVLSMPQVNIVKKTEVQTGGFSKESILPKRNSDKLIARKKDWDPKKYGGFDSPTVAYSVLVVAKVEKGKSKKLKSVKELLGITIMERSSFEKNPIDFLEAKGYKEVKKDLIIKLPKYSLFELENGRKRMLASAGELQKGNELALPSKYVNFLYLASHYEKLKGSPEDNEQKQLFVEQHKHYLDEIIEQISEFSKRVILADANLDKVLSAYNKHRDKPIREQAENIIHLFTLTNLGAPAAFKYFDTTIDRKRYTSTKEVLDATLIHQSITGLYETRIDLSQLGGDSGGSPKKKRKV

SEQ ID NO: 39 - DNA, 85 bp, Homo sapiens
aagatggatgcagaattccgacatgactcaggatatgaagttcatcatcaaaaattggtacgtaaaataatttacctctttccac

SEQ ID NO: 40 - DNA, 85 bp, Homo sapiens
gtggaaagaggtaaattattttacgtaccaatttttgatgatgaacttcatatcctgagtcatgtcggaattctgcatccatctt

SEQ ID NO: 41 - protein, 19 aa, Homo sapiens
KMDAEFRHDSGYEVHHQKL

SEQ ID NO: 42 - DNA, 101 bp, Homo sapiens
gttctgggttgacaaatatcaagacggaggagatctctgaagtgaagatggatgcagaattccgacatgactcaggatatgaagttcatcatcaaaaattg

SEQ ID NO: 43 - protein, 33 aa, Homo sapiens
SGLTNIKTEEISEVKMDAEFRHDSGYEVHHQKL

SEQ ID NO: 44 - DNA, 2400 bp, Homo sapiens
aagttacagggaagctgattctggcttcatgtaaaaaaaggacagtttgggcaggcaaatctatcaaaaaatggagggaaattgatacattcctctatgttcaaacaggaactgacaatctgcccctgggtgggaacacggtagagaagatgacttcaaaagcccttttcatcctaaaattctgatgtttgataattaaatgttatagcatggacactgacatttacattttttacttatgtttttggtttttaaatgactctgcattttgttttaagcttcaaattattatttgaataatgaaattcatcagaacaattagtgttaagaatcatatagcaatttatagaaaaggaagagttcgtaggttataaattctgttagttgctaagaagcatttttaaaattatgtactatagctctttattcagcagacgaaccaattacaatctgtgtaactagaacacttgactaaaattatataatttttacaacgcttcactgcatagatacatgaacataatttatttgtaattggaacaaagccccaaagtagcagttttgttctaccaggtaattaatgctcatttttaaagccttttattattatttctgaagtaatgagtgcacatggaaaaagacacataataggctaaacaataagcccgtaagccaagccaacatattccaggaacaaatccttgccaacctctcaaccaggatttaacttctgcttttcccccattttcaaaaattatagcatgtatttaaaggcagcagaagccttactttcaggtttcccttaccctttcatttctttttgttcaaaataggtagtaattgaagttttaaatatagggtatcatttttctttaagagtcatttatcaattttcttctaacttcaggcctagaaagaagttttgggtaggctttgtcttacagtgttattatttatgagtaaaactaattggttgtcctgcatactttaattatgatgtaatacaggttctgggttgacaaatatcaagacggaggagatctctgaagtgaagatggatgcagaattccgacatgactcaggatatgaagttcatcatcaaaaattggtacgtaaaataatttacctctttccactactgtttgtcttgccaaatgacctattaactctggttcatcctgtgctagaaatcaaattaaggaaaagataaaaatacaatgcttgcctataggattaccatgaaaacatgaagaaaataaataggctaggctgagcgcagtggctcaagcctgtaatcccagcactttgggaggccaaggcgggtggatcacgaggtcagaaattcgagaccagcctggccaatatggtgaaaccccatctctactaaaaatacaaaaaagattagctgggtgtggtggcaaacacctgtagtcccagctgctggggaggctgacgcaggagacttgcttgaacccaggaggtggaggttgcagtgagctgagatcgtgcctaggcgacagagcgagactccatcccaaaaaaaaaaaagaaaagaaagaggctgtatgtatagttctttcagactacaaggcagcaaagttcgtgcatgactcgggacttaaagtggaattaatttcaatatagcagccactttgacttccactgtgttttctgggaaaataggtttacaataggtttatttgaaggatcaaacacatgcatacactgcttggttttacagaacactttatgtggcttaaattcacatccggaactgtcttcctttacccattcatttctcccccagctctttcttttcattccctcccctacctcccatgatttaacttctcttgcaagagtaagatcatggagtgagcaggaccccatgatgttcccgatagtgttattcatcaaaaggtttgtgcaaagaagacagcagcttccttttcagatgaaatcacttttcccccctaatgttagaattggagtaaatcaaaaagccacatctcctttgtggtcagctctagtagttatataaaatcctttaccaaaagcttagaaatggagataaatcaaatcgtggattatgttagggttccatcttatcagtaggtgcagtaagagggttaaattaatgaagacgacaattttatcacattcagtggtggacagaaaaatggtaagaaaatttccatagcaataatacttaaagttatctcaggcacttcttttgttttgttttgtgtgtgtgtgtgtgtgagtgttacttttttccaagcagaaaatgtcttttcaatattcataaagttgataaatcctagtattaatctctaaaagaaacacctccaaattattatttatgccttacttgactccaaataattgtagcaaataaaa

SEQ ID NO: 45 - protein, 101 aa, Homo sapiens
KMDAEFRHDSGYEVHHQKLVFFAEDVGSNKGAIIGLMVGGVVIATVIVITLVMLKKKQYTSIHHGVVEVDAAVTPEERHLSKMQQNGYENPTYKFFEQMQN

SEQ ID NO: 46 - DNA, 34 bp, Homo sapiens
gagatctctgaagtgaagatggatgcagaattcc

SEQ ID NO: 47 - DNA, 34 bp, Homo sapiens
ggaattctgcatccatcttcacttcagagatctc

SEQ ID NO: 48 - protein, 11 aa, Homo sapiens
EISEVKMDAEF

SEQ ID NO: 49 - DNA, 33 bp, Artificial Sequence
  Mutated sequence
gagatctctgaagtgaaaataaatacaaaattc

SEQ ID NO: 50 - DNA, 33 bp, Artificial Sequence
  Mutated sequence
gaattttgtatttattttcacttcagagatctc

SEQ ID NO: 51 - protein, 11 aa, Artificial Sequence
  Mutated sequence
EISEVKINTKF

SEQ ID NO: 52 - DNA, 27 bp, Homo sapiens
ggaattctgcatccatcttcacttcag

SEQ ID NO: 53 - DNA, 26 bp, Homo sapiens
attctgcatccatcttcacttcagag

SEQ ID NO: 54 - DNA, 25 bp, Homo sapiens
ttctgcatccatcttcacttcagag

SEQ ID NO: 55 - DNA, 24 bp, Homo sapiens
tctgcatccatcttcacttcagag

SEQ ID NO: 56 - DNA, 23 bp, Homo sapiens
ctgcatccatcttcacttcagag

SEQ ID NO: 57 - DNA, 22 bp, Homo sapiens
tgcatccatcttcacttcagag

SEQ ID NO: 58 - DNA, 21 bp, Homo sapiens
gcatccatcttcacttcagag

SEQ ID NO: 59 - DNA, 28 bp, Homo sapiens
attctgcatccatcttcacttcagagat

SEQ ID NO: 60 - DNA, 27 bp, Homo sapiens
ttctgcatccatcttcacttcagagat

SEQ ID NO: 61 - DNA, 26 bp, Homo sapiens
tctgcatccatcttcacttcagagat

SEQ ID NO: 62 - DNA, 25 bp, Homo sapiens
ctgcatccatcttcacttcagagat

SEQ ID NO: 63 - DNA, 24 bp, Homo sapiens
tgcatccatcttcacttcagagat

SEQ ID NO: 64 - DNA, 23 bp, Homo sapiens
gcatccatcttcacttcagagat

SEQ ID NO: 65 - DNA, 26 bp, Homo sapiens
attctgcatccagattcacttcagag

SEQ ID NO: 66 - DNA, 25 bp, Homo sapiens
ttctgcatccagattcacttcagag

SEQ ID NO: 67 - DNA, 24 bp, Homo sapiens
tctgcatccagattcacttcagag

SEQ ID NO: 68 - DNA, 23 bp, Homo sapiens
ctgcatccagattcacttcagag

SEQ ID NO: 69 - DNA, 22 bp, Homo sapiens
tgcatccagattcacttcagag

SEQ ID NO: 70 - DNA, 21 bp, Homo sapiens
gcatccagattcacttcagag

SEQ ID NO: 71 - DNA, 28 bp, Homo sapiens
attctgcatccagattcacttcagagat

SEQ ID NO: 72 - DNA, 27 bp, Homo sapiens
ttctgcatccagattcacttcagagat

SEQ ID NO: 73 - DNA, 26 bp, Homo sapiens
tctgcatccagattcacttcagagat

SEQ ID NO: 74 - DNA, 25 bp, Homo sapiens
ctgcatccagattcacttcagagat

SEQ ID NO: 75 - DNA, 24 bp, Homo sapiens
tgcatccagattcacttcagagat

SEQ ID NO: 76 - DNA, 23 bp, Homo sapiens
gcatccagattcacttcagagat

SEQ ID NO: 77 - DNA, 24 bp, Homo sapiens
atggatgcagaattccgacatgac

SEQ ID NO: 78 - DNA, 23 bp, Homo sapiens
tggatgcagaattccgacatgac

SEQ ID NO: 79 - DNA, 22 bp, Homo sapiens
ggatgcagaattccgacatgac

SEQ ID NO: 80 - DNA, 21 bp, Homo sapiens
gatgcagaattccgacatgac

SEQ ID NO: 81 - DNA, 20 bp, Homo sapiens
atgcagaattccgacatgac

SEQ ID NO: 82 - DNA, 19 bp, Homo sapiens
tgcagaattccgacatgac

SEQ ID NO: 83 - DNA, 23 bp, Homo sapiens
tgaagttcatcatcaaaaattgg

SEQ ID NO: 84 - DNA, 22 bp, Homo sapiens
gaagttcatcatcaaaaattgg

SEQ ID NO: 85 - DNA, 21 bp, Homo sapiens
aagttcatcatcaaaaattgg

SEQ ID NO: 86 - DNA, 20 bp, Homo sapiens
agttcatcatcaaaaattgg

SEQ ID NO: 87 - DNA, 19 bp, Homo sapiens
gttcatcatcaaaaattgg

SEQ ID NO: 88 - DNA, 18 bp, Homo sapiens
ttcatcatcaaaaattgg

SEQ ID NO: 89 - DNA, 26 bp, Homo sapiens
catcatcaaaaattggtacgtaaaat

SEQ ID NO: 90 - DNA, 25 bp, Homo sapiens
atcatcaaaaattggtacgtaaaat

SEQ ID NO: 91 - DNA, 24 bp, Homo sapiens
tcatcaaaaattggtacgtaaaat

SEQ ID NO: 92 - DNA, 23 bp, Homo sapiens
catcaaaaattggtacgtaaaat

SEQ ID NO: 93 - DNA, 22 bp, Homo sapiens
atcaaaaattggtacgtaaaat

SEQ ID NO: 94 - DNA, 21 bp, Homo sapiens
tcaaaaattggtacgtaaaat

SEQ ID NO: 95 - protein, 7 aa, Artificial Sequence
  NLS
PKKKRKV

SEQ ID NO: 96 - protein, 16 aa, Artificial Sequence
  NLS
KRPAATKKAGQAKKKK

SEQ ID NO: 97 - protein, 11 aa, Artificial Sequence
  NLS
SPKKKRKVEAS

SEQ ID NO: 98 - protein, 6 aa, Artificial Sequence
  NLS
KKKRKV

SEQ ID NO: 99 - protein, 18 aa, Artificial Sequence
  NLS
SPKKKRKVEASPKKKRKV

SEQ ID NO: 100 - protein, 5 aa, Artificial Sequence
  NLS
KKKRK

SEQ ID NO: 101 - protein, 12 aa, Artificial Sequence
  PTD
RRQRRTSKLMKR

SEQ ID NO: 102 - protein, 27 aa, Artificial Sequence
  PTD
GWTLNSAGYLLGKINLKALAALAKKIL

SEQ ID NO: 103 - protein, 33 aa, Artificial Sequence
  PTD
KALAWEAKLAKALAKALAKHLAKALAKALKCEA

SEQ ID NO: 104 - protein, 16 aa, Artificial Sequence
  PTD
RQIKIWFQNRRMKWKK

SEQ ID NO: 105 - protein, 8 aa, Artificial Sequence
  PTD
KKRRQRRR

SEQ ID NO: 106 - protein, 9 aa, Artificial Sequence
  PTD
RKKRRQRRR

SEQ ID NO: 107 - protein, 189 aa, Artificial Sequence
  Endosomal escape peptide
VGSSLSCINLDWDVIRDKTKTKIESLKEHGPIKNKMSESPNKTVSEEKAKQYLEEFHQTALEHPELSELKTVTGTNPVFAGANYAAWAVNVAQVIDSETADNLEKTTAALSILPGIGSVMGIADGAVHHNTEEIVAQSIALSSLMVAQAIPLVGELVDIGFAAYNFVESIINLFQVVHNSYNRPAYSPG

SEQ ID NO: 108 - protein, 30 aa, Artificial Sequence
  Endosomal escape peptide
WEAALAEALAEALAEHLAEALAEALEALAA

SEQ ID NO: 109 - protein, 115 aa, Artificial Sequence
  Endosomal escape peptide
VLAGNPAKHDLDIKPTVISHRLHFPEGGSLAALTAHQACHLPLETFTRHRQPRGWEQLEQCGYPVQRLVALYLAARLSWNQVDQVIRNALASPGSGGDLGEAIREQPEQARLALT

SEQ ID NO: 110 - protein, 24 aa, Artificial Sequence
  Endosomal escape peptide
GLFEAIEGFIENGWEGMIDGWYGC

SEQ ID NO: 111 - protein, 26 aa, Artificial Sequence
  Endosomal escape peptide
KKALLALALHHLAHLALHLALALKKA

SEQ ID NO: 112 - protein, 18 aa, Artificial Sequence
  Endosomal escape peptide
KWKLFKKIGAVLKVLTTG

SEQ ID NO: 113 - protein, 24 aa, Artificial Sequence
  Endosomal escape peptide
LLGRRGWEVLKYWWNLLQYWSQEL

SEQ ID NO: 114 - protein, 23 aa, Artificial Sequence
  Endosomal escape peptide
GLFHAIAHFIHGGWHGLIHGWYG

SEQ ID NO: 115 - protein, 23 aa, Artificial Sequence
  Endosomal escape peptide
GLFGAIAGFIENGWEGMIDGWYG

SEQ ID NO: 116 - protein, 23 aa, Artificial Sequence
  Endosomal escape peptide
LIRLWSHLIHIWFQNRRLKWKKK

SEQ ID NO: 117 - protein, 189 aa, Artificial Sequence; identical to SEQ ID NO: 107
  Endosomal escape peptide

SEQ ID NO: 118 - protein, 14 aa, Artificial Sequence
  Protein transduction domain
SGYGRKKRRQRRRC

SEQ ID NO: 119 - protein, 11 aa, Artificial Sequence
  Protein transduction domain
YGRKKRRQRRR

SEQ ID NO: 120 - protein, 21 aa, Artificial Sequence
  Protein transduction domain
KETWWETWWTEWSQPKKKRKV

SEQ ID NO: 121 - DNA, 22 bp, Artificial Sequence
  Primer
acactgacgacatggttctaca

SEQ ID NO: 122 - DNA, 22 bp, Artificial Sequence
  Primer
tacggtagcagagacttggtct

SEQ ID NO: 123 - DNA, 20 bp, Homo sapiens
gcagaattccgacatgactc

SEQ ID NO: 124 - DNA, 20 bp, Homo sapiens
atggatgcagaattccgaca

SEQ ID NO: 125 - DNA, 20 bp, Homo sapiens
tgcagaattccgacatgact

SEQ ID NO: 126 - DNA, 20 bp, Artificial Sequence
  Protospacer sequence
gcagaattccgacatgactc

SEQ ID NO: 127 - DNA, 20 bp, Artificial Sequence
  Protospacer sequence
gcagaattccgacatgactc

SEQ ID NO: 128 - DNA, 20 bp, Artificial Sequence
  Protospacer sequence
gcagaattccgacatgactc

SEQ ID NO: 129 - DNA, 20 bp, Artificial Sequence
  Protospacer sequence
atggatgcagaattccgaca

SEQ ID NO: 130 - DNA, 20 bp, Artificial Sequence
  Protospacer sequence
atggatgcagaattccgaca

SEQ ID NO: 131 - DNA, 20 bp, Artificial Sequence
  Protospacer sequence
atggatgcagaattccgaca

SEQ ID NO: 132 - DNA, 20 bp, Artificial Sequence
  Protospacer sequence
tgcagaattccgacatgact

SEQ ID NO: 133 - DNA, 20 bp, Artificial Sequence
  Protospacer sequence
tgcagaattccgacatgact

SEQ ID NO: 134 - DNA, 20 bp, Artificial Sequence
  Protospacer sequence
tgaagttcatcatcaaaaat

SEQ ID NO: 135 - DNA, 20 bp, Artificial Sequence
  Protospacer sequence
catcatcaaaaattggtacg

SEQ ID NO: 136 - DNA, 50 bp, Artificial Sequence
  Guide RNA coding sequence
gatgacgaacttcatatcctgagtcatgtcggaattctgcatccatcttc

SEQ ID NO: 137 - DNA, 51 bp, Artificial Sequence
  Guide RNA coding sequence
gaccaatttttgatgacgaacttcatatcctgagtcatgtcggaattctgc

SEQ ID NO: 138 - RNA, 22 nt, Artificial Sequence
  Guide RNA
auucugcauccaucuucacuuc

SEQ ID NO: 139 - RNA, 22 nt, Artificial Sequence
  Guide RNA
auucugcauccaucuucacuuc

SEQ ID NO: 140 - RNA, 20 nt, Artificial Sequence
  Guide RNA
gcagaauuccgacaugacuc

SEQ ID NO: 141 - RNA, 20 nt, Artificial Sequence
  Guide RNA
ugaaguucaucaucaaaaau

SEQ ID NO: 142 - RNA, 20 nt, Artificial Sequence
  Guide RNA
caucaucaaaaauugguacg

SEQ ID NO: 143 - RNA, 106 nt, Artificial Sequence
  Guide RNA
ugaaguucaucaucaaaaauguuuaagagcuaugcuggaaacagcauagcaaguuuaaauaaggcuaguccguuaucaacuugaaaaaguggcaccgagucggugc

SEQ ID NO: 144 - RNA, 96 nt, Artificial Sequence
  Guide RNA
caucaucaaaaauugguacgguuuuaguacucuggaaacagaaucuacuaaaacaaggcaaaaugccguguuuaucucgucaacuuguuggcgaga

SEQ ID NO: 145 - RNA, 50 nt, Artificial Sequence
  Guide RNA
gaugacgaacuucauauccugagucaugucggaauucugcauccaucuuc

SEQ ID NO: 146 - RNA, 50 nt, Artificial Sequence
  Guide RNA
accaauuuuugaugacgaacuucauauccugagucaugucggaauucugc

SEQ ID NO: 147 - RNA, 63 nt, Artificial Sequence
  Guide RNA
guggaauaguauaacaauaugcuaaauguuguuauaguaucccacuuuuugaugacgaacuuc

SEQ ID NO: 148 - RNA, 73 nt, Artificial Sequence
  Guide RNA
accaauuuuugaugacgaacuucauauccugagucauguuguggaagguccaguuuugggggcuauuacaaca

1. A method of decreasing Amyloid Precursor Protein (APP) processing into amyloidogenic Aβ peptide by a cell or the aggregation of the Aβ peptide, comprising providing said cell with:
a. a1) at least one guide RNA comprising a seed region of at least 18 consecutive nucleotides of a target sequence in an endogenous APP-encoding polynucleotide sequence present in said cell, wherein the target sequence of the guide RNA guide sequence is contiguous to a protospacer adjacent motif (PAM) in the endogenous APP gene polynucleotide sequence and wherein said PAM is recognized by a ribonucleoprotein complex comprising a Cas9 nickase; or
a2) a vector comprising a nucleic acid sequence corresponding to the guide RNA for expressing the guide RNA; and
b. b1) a Cas nickase-deaminase fusion protein comprising (i) a Cas nickase polypeptide domain and (ii) a cytidine deaminase polypeptide domain or an adenosine deaminase polypeptide domain; or
b2) a vector comprising a nucleic acid sequence encoding the Cas nickase-deaminase fusion protein, for expression of the Cas nickase-deaminase fusion protein; and
wherein at least one modification is introduced into the target sequence of the APP-encoding polynucleotide, wherein the at least one modification comprises modification of a cytidine into a thymidine or an adenosine into an inosine, and wherein the at least one modification decreases the processing of APP into amyloidogenic Aβ peptide by the cell or the aggregation of the Aβ peptide; and wherein if the APP-encoding nucleotide is mRNA and the at least one modification comprises deamination of an adenosine into an inosine, the gRNA further comprises a cytidine mismatch with the adenosine to be deaminated to an inosine in the target sequence.

2-4. (canceled)

5. The method of claim 1, wherein the at least one modification is located in intron 15, exon 16, intron 16, exon 17 and/or intron 17 of the APP-encoding polynucleotide sequence.

6. The method of claim 1, wherein said at least one modification results in at least one amino acid substitution in the region defined by amino acid positions 656 to 688 in the APP protein, wherein said amino acid positions are with respect to the APP protein sequence as set forth in SEQ ID NO: 2.

7. The method of claim 6, wherein said at least one amino acid substitution corresponds to at least one substitution at amino acid position 670, 671, 673, 678, 682, 684, 692, 693, 694, 704, 711, 712, 713, 714, 715 and/or 684 of the APP protein.

8-11. (canceled)

12. The method of claim 5, wherein said at least one modification corrects a mutation associated with an increased risk of developing Alzheimer's disease present in said endogenous APP polynucleotide gene sequence present in said cell.

13. The method of claim 5, wherein said at least one modification results in a mutation which reduces risk of developing Alzheimer's disease by reducing the formation or the aggregation of Amyloidogenic peptides.

14-26. (canceled)

27. A guide RNA as defined in claim 1.

28. An isolated nucleic acid comprising a nucleotide sequence corresponding to the guide RNA of claim 27 for expressing the guide RNA.

29. (canceled)

30. A vector comprising the isolated nucleic acid of claim 28.

31-50. (canceled)

51. A method of decreasing Amyloid Precursor Protein (APP) processing into amyloidogenic Aβ peptide by a cell or the aggregation of the Aβ peptide, comprising providing said cell with:
a. a1) at least one pegRNA comprising a seed region of at least 18 consecutive nucleotides of a target sequence in an endogenous APP-encoding polynucleotide sequence present in said cell, wherein the target sequence of the pegRNA guide sequence is contiguous to a protospacer adjacent motif (PAM) in the endogenous APP gene polynucleotide sequence and wherein said PAM is recognized by a ribonucleoprotein complex comprising a Cas9 nickase; or
a2) a vector comprising a nucleic acid sequence corresponding to the pegRNA for expressing the pegRNA; and
b. b1) a Cas nickase-reverse transcriptase fusion protein comprising (i) a Cas nickase polypeptide domain and (ii) a reverse transcriptase polypeptide domain; or
b2) a vector comprising a nucleic acid sequence encoding the Cas nickase-reverse transcriptase fusion protein, for expression of the Cas nickase-reverse transcriptase fusion protein; and
wherein at least one modification is introduced into the target sequence of the APP-encoding polynucleotide, wherein the at least one modification decreases the processing of APP into amyloidogenic Aβ peptide by the cell or the aggregation of the Aβ peptide.

52-54. (canceled)

55. The method of claim 51, wherein the at least one modification is located in intron 15, exon 16, intron 16, exon 17 and/or intron 17 of the APP-encoding polynucleotide sequence.

56. The method of claim 51, wherein said at least one modification results in at least one amino acid substitution in the region defined by amino acid positions 656 to 688 in the APP protein, wherein said amino acid positions are with respect to the APP protein sequence as set forth in SEQ ID NO: 2.

57. The method of claim 56, wherein said at least one amino acid substitution corresponds to at least one substitution at amino acid position 670, 671, 673, 678, 682, 684, 692, 693, 694, 704, 711, 712, 713, 714, 715 and/or 684 of the APP protein.

58-61. (canceled)

62. The method of claim 55, wherein said at least one modification corrects a mutation associated with an increased risk of developing Alzheimer's disease present in said endogenous APP polynucleotide gene sequence present in said cell.

63. The method of claim 55, wherein said at least one modification results in a mutation which reduces risk of developing Alzheimer's disease by reducing the formation or the aggregation of Amyloidogenic peptides.

64-76. (canceled)

77. A guide RNA as defined in claim 51.

78. An isolated nucleic acid comprising a nucleotide sequence corresponding to the guide RNA of claim 77 for expressing the guide RNA.

79. (canceled)

80. A vector comprising the isolated nucleic acid of claim 78.

81-100. (canceled)

101. The method of claim 7, wherein said at least one amino acid substitution corresponds to at least one substitution at amino acid position 673 and/or 684 of the APP protein.

101. The method of claim 57, wherein said at least one amino acid substitution corresponds to at least one substitution at amino acid position 673 and/or 684 of the APP protein.
